(19) United States
(12) Patent Application Publication
(10) Pub. No.: US 2026/0002160 A1
(43) Pub. Date: Jan. 1, 2026

(54) SIRNA TARGETING AND REGULATING PCSK9 GENE EXPRESSION AND USE THEREOF

(71) Applicant: Hangzhou Tianlong Pharmaceutical Co., Ltd., Hangzhou, Zhejiang (CN)

(72) Inventors: Gengshen SONG, Beijing (CN); Zeao HUANG, Beijing (CN); Shuo YANG, Beijing (CN); Zhikang TIAN, Beijing (CN); Yucheng WU, Beijing (CN); Peng YAO, Beijing (CN); Xiaowen YU, Beijing (CN); Dawei HUANG, Beijing (CN); Xue PANG, Beijing (CN); Fang LIN, Beijing (CN)

(21) Appl. No.: 19/106,142

(22) PCT Filed: Mar. 18, 2024
(86) PCT No.: PCT/CN2024/082133

§ 371 Date: Feb. 24, 2025

(30) Foreign Application Priority Data
Nov. 6, 2023 (CN) 202311463375.7

(51) Int. Cl. C12N 15/113; A61P 3/06

(52) U.S. Cl. CPC C12N 15/1137; A61P 3/06; C12N 2310/11; C12N 2310/14; C12N 2310/312; C12N 2310/321; C12N 2310/322; C12N 2310/351; C12Y 304/21061

(57) ABSTRACT

The present disclosure relates to siRNAs that target and regulate PCSK9 gene expression and use thereof. Experimental results show that some alternately modified and specific template-modified oligonucleotide sequences can significantly inhibit PCSK9 expression and can be used to develop drugs to treat PCSK9-related diseases.

[0001] This application claims the priority of Chinese Patent Application No. 202311463375.7, filed with the China National Intellectual Property Administration on Nov. 6, 2023, and titled with “SIRNA TARGETING AND REGULATING PCSK9 GENE EXPRESSION AND USE THEREOF”, which is hereby incorporated by reference in its entirety.

### TECHNICAL FIELD

[0002] The present disclosure relates to the technical field of nucleic acid modification, and specifically relates to a small interfering ribonucleic acid (siRNA) modified by multiple chemical methods and use thereof in the manufacture of a medicament for a disease related to PCSK9 gene expression.

### BACKGROUND

[0003] Nucleic acid drugs, particularly oligonucleotide drugs, are widely employed due to their straightforward synthesis and high activity. Oligonucleotide drugs typically encompass antisense oligonucleotides (ASOs), small interfering RNA (siRNA), microRNA (miRNA), and nucleic acid aptamers.

[0004] Oligonucleotides are a class of short DNA or RNA molecules or oligomers that readily bind to their respective complementary oligonucleotides, DNA or RNA in a sequence-specific manner to form duplexes, or less commonly, higher order hybrids. This fundamental property renders oligonucleotides a valuable tool in genetic testing, research and medicine. In their natural state, oligonucleotides are typically small RNA molecules that regulate gene expression or intermediates derived from the decomposition of larger nucleic acid molecules.

[0005] RNA interference (RNAi) is a natural defense mechanism against foreign genes. siRNA can knock out target genes by recognizing specific sequences and degrading target mRNA.

[0006] Effective molecules of classic RNAi are composed of the iconic 19+2 nucleotide polymer structure, which is a double helix consisting of a 21-nucleotide RNA molecule and a nucleotide molecule corresponding to 19 nucleobases, including a 2-nucleotide 3′-end overhang. One strand of siRNA (the guide strand or antisense strand) is complementary to the target gene transcript mRNA, and the other strand is labeled as the passenger strand (or sense strand). The antisense strand of siRNA guides Argonaute protein (AGO2) to complement the target transcript and is incorporated into the RNA-induced silencing complex (RISC). The complete complementarity between the siRNA (the antisense strand) and the target leads to the cleavage of the target transcript at the 10 to 11 position opposite the guide strand (antisense strand) under the catalysis of the AGO2 protein.

[0007] siRNA has innate advantages over small molecules and antibody drugs because siRNA executes its function by complete Watson-Crick base pairing with mRNA, whereas small molecules and monoclonal antibody drugs need to recognize the complicated spatial conformation of certain proteins. As a result, there are many diseases are not treatable by small molecules and monoclonal antibody drugs since their target molecules have high activity, and the molecular structures with which they have affinity and binding specificity cannot be recognized. The mechanism of action of siRNA drugs enables them to regulate the expression of target proteins at the genetic level, and has targeting specificity compared to small molecules or antibody drugs. Its mechanism based on the principle of complementary base pairing also confers the siRNA with a wider therapeutic area, simpler design and a shorter research and development span.

[0008] Oligonucleotides are capable of binding complementary RNA chains in a sequence-specific manner and can induce RNase H to cleave target RNA after hybridization. In natural oligonucleotides, nucleotides are linked by phosphodiester bonds, which are particularly vulnerable to nucleases under physiological conditions. Therefore, natural, structurally unmodified, and unmodified oligonucleotide drugs, which are susceptible to rapid degradation by nucleases in vivo, exhibit low activity and poor druggability. Chemical modification of the oligonucleotide structure is an effective method of increasing its activity, which can improve its stability to nucleases and its affinity to RNA, and facilitate cellular endocytosis and tissue targeting, thereby effectively regulating the expression of the target gene.

[0009] Four types of chemical modifications can be performed on oligonucleotides according to their basic structure including a base, a sugar ring, a phosphate backbone, and ends.

[0010] 1) Modification of base: It is mainly divided into three forms: purine modification, pyrimidine modification and base substitution. Purine modification includes N6-methyladenosine, N1-methyladenosine, and 7-methylguanylate. Pyrimidine modification includes 3-methyluridine, 5-methyluridine, 5-methylcytosine, N4-acetylcytidine, pseudouridine, thiouridine, propyne uridine and dihydrouridine.

[0011] 2) Modification of sugar ring: It is mainly divided into sugar ring modification and substitution. Sugar ring modification includes 2′-modification, 4′-modification, 5′-modification, isomeric modification, and combinations thereof. The most common 2′-modifications of siRNA are 2′-OMe (2′-methoxy) and 2′-F (2′-fluoro) modifications. siRNA modified with both 2′-OMe and 2′-F has a higher Tm value, enhanced serum stability and better activity than natural siRNA.

[0012] 3) Modification of phosphate backbone: It mainly includes modification with phosphorothioate; modification methyl with phosphonate, selenophosphate, methylborylphosphate or dithiophosphate, and replacement of the bridging oxygen atom in the phosphodiester linkage region with a sulfur atom; replacement of the entire phosphate group between nucleosides with a group that does not contain a phosphorus atom, such as replacement of the P atom with a C, S, or N atom to form a guanidine group, S-methylthiourea, and the like.

[0013] 4) Modification of end: It includes covalent conjugation of special groups at the 5′-end and/or 3′-end of the sense chain and phosphorylation modification of the 5′-end of the antisense chain.

[0014] All oligonucleotide drugs that have been marketed have undergone chemical modification. Since the first nucleic acid drug, Fomivirsen (Vitravene), was approved for marketing in 1998, the chemical modification technology of nucleic acid drugs has been continuously upgraded. So far, 18 nucleic acid drugs have been approved for marketing worldwide:

TABLE 1
Nucleic acid drugs approved for marketing worldwide

| | Generic name | | | | Approval |
|---|---|---|---|---|---|
| No. | (Trade name) | Company | Classification | Indications | Date |
| 1 | Fomivirsen | “Ionis/Novartis” | Antisense | Cytomegalovirus (CMV) | 1998 Aug. 1 |
| | (Vitravene) | Novartis | Oligonucleotides | retinitis | |
| 2 | Pegaptanib | NeXstar/Eyetech | Aptamers | Neovascular age-related | 2004 Dec. 1 |
| | (Macugen) | | | macular degeneration | |
| 3 | Mipomersen | Ionis/Genzyme/Kastle | Antisense | Homozygous familial | 2013 Jan. 1 |
| | (Kynamro) | | Oligonucleotides | hypercholesterolemia | |
| 4 | Defibrotide | Jazz | Oligonucleotide | Hepatic veno-occlusive | 2016 Mar. 1 |
| | (Defitelio) | | mixture | disease | |
| 5 | Eteplirsen | Sarepta | Antisense | Duchenne muscular | 2016 Sep. 1 |
| | (Exondys 51) | | Oligonucleotides | dystrophy | |
| 6 | Nusinersen | Ionis/Biogen | Antisense | Spinal muscular atrophy | 2016 Dec. 1 |
| | (Spinraza) | | Oligonucleotides | | |
| 7 | Patisiran | Alnylam | siRNA | Hereditary transthyretin | 2018 Aug. 1 |
| | (Onpattro) | | | amyloidosis, | |
| | | | | polyneuropathy | |
| 8 | Inotersen | Ionis/Akcea | Antisense | Hereditary transthyretin | 2018 Oct. 1 |
| | (Tegsedi) | | Oligonucleotides | amyloidosis, | |
| | | | | polyneuropathy | |
| 9 | Volanesorsen | Ionis | Antisense | Familial | 2019 May 3 |
| | (Waylivra) | | Oligonucleotides | Chylomicronemia | |
| | | | | Syndrome (FCS) | |
| 10 | Givosiran | Alnylam | siRNA | Hepatic porphyria | 2019 Nov. 1 |
| | (Givlaari) | | | | |
| 11 | Golodirsen | Sareta | Antisense | Duchenne muscular | 2019 Dec. 1 |
| | (Vyondys 53) | | Oligonucleotides | dystrophy | |
| 12 | Viltolarsen | Nippon Shinyaku | Antisense | Pseudohypertrophic | 2020 Mar. 25 |
| | (Viltepso) | | Oligonucleotides | muscular dystrophy | |
| 13 | Lumasiran | Alnylam | siRNA | Hyperoxaluria | 2020 Nov. 24 |
| | (Oxlumo) | Pharmaceuticals, | | | |
| | | Dicerna | | | |
| | | Pharmaceuticals | | | |
| | | (Novo Nordisk) | | | |
| 14 | Casimersen | Sarepta Therapeutics, | Antisense | Pseudohypertrophic | 2021 Feb. 25 |
| | (Amondys 45) | University of Western | Oligonucleotides | muscular dystrophy | |
| | | Australia | | | |
| 15 | Inclisiran | Alnylam | siRNA | Atherosclerosis, | 2021 Dec. 22 |
| | (Leqvio) | Pharmaceuticals, The | | hypercholesterolemia, | |
| | | Medicines Company | | combined hyperlipidemia | |
| | | (Novartis) | | | |
| 16 | Amvuttra | Alnylam | siRNA | Amyloid polyneuropathy | 2022 Jun. 13 |
| | (vutrisiran) | | | | |
| 17 | Qalsody | Biogen | Antisense | Amyotrophic lateral | 2023 Apr. 25 |
| | (tofersen) | | Oligonucleotides | sclerosis (ALS) | |
| 18 | Avaccincaptad | Iveric Bio | Aptamers | Geographic atrophy (GA) | 2023 Aug. 4 |
| | Pegol | | | secondary to age-related | |
| | (Izervay) | | | macular degeneration | |
| | | | | (AMD) | |

[0015] The treatment strategy for hypercholesterolemia is primarily focused on the reduction of low-density lipoprotein cholesterol (LDL-C), which causes atherosclerosis, and the elevation of high-density lipoprotein cholesterol (HDL-C), which has a potential cardioprotective effect. Clinical studies involving nearly 170,000 subjects demonstrated that a 1.0 mmol/L reduction in LDL-C levels is associated with a 20% reduction in the average annual incidence rate of major cardiovascular disease events. The drugs recommended in the 2019 version of the “Guidelines for Primary Diagnosis and Treatment of Dyslipidemia” for the reduction of LDL-C encompass a range of options, including statins, cholesterol absorption inhibitors, Robutecol, PCSK9 inhibitors, and others, among which statins are identified as the preferred initial choice. The 2018 version of the “Chinese Expert Consensus on Screening, Diagnosis and Treatment of Familial Hypercholesterolemia” recommends statins and combined treatment with ezetimibe and PCSK9 inhibitors.

[0016] Proprotein convertase subtilisin/kexin type 9 (PCSK9) is a serine protease encoded by the PCSK9 gene, with the majority of its production occurring in the liver. PCSK9 binds to the LDL receptor (LDL-R) on the surface of liver cells, leading to the degradation of LDL-R. Given that LDL-R is responsible for binding to LDL-C in plasma and subsequently transporting LDL-C into the liver, which processes the blood lipids in it and excretes it through bile, the degradation of LDL-R will result in an elevation of LDL-C levels in plasma. Inhibitors of PCSK9 reduce the expression level of PCSK9, increase the level of LDL-R on the surface of liver cells, and thus reduce the level of LDL-C in plasma, achieving the objective of lowering blood lipids.

[0017] In order to effectively treat hypercholesterolemia and dyslipidemia, there is a need in the art to further develop drugs that regulate PCSK9 gene expression.

### SUMMARY

[0018] In the present disclosure, a series of unique siRNA sequences are designed by targeting the PCSK9 mRNA sequence and subjected to alternate modifications and specific template modifications.

[0019] It is common practice to modify siRNA with 2′-methoxy (2′-OMe) and 2′-fluoro (2′-F) for the monomer. However, even if only the combination of the above two monomer modifications is considered, for siRNA, which has a total of 44 bases on the sense strand and antisense strand, there are 2⁴⁴ potential combinations. Furthermore, with different terminal thiolation modifications, the number of possible modification schemes is significantly increased.

[0020] Identical siRNA sequences undergoing different modification methods display markedly disparate activities. Similarly, siRNA sequences that have been modified using the same modification method exhibit considerable variation in their activities. Despite certain principles for the design of modification of siRNAs, previous studies have demonstrated that the activity cannot be accurately inferred based on the modification method employed. This indicates that there is no definitive correlation between the modification method and the activity. Consequently, it is exceedingly challenging to identify modification schemes with high activity from the multitude of potential combinations.

[0021] In the present disclosure, chemical modifications are introduced to the designed siRNA sequences, and some sequences with alternate modifications and special modifications that exhibit a notable inhibitory effect on PCSK9 gene expression are screened out.

[0022] In an aspect, the present disclosure provides a double-stranded RNAi agent for reducing PCSK9 expression, comprising an oligonucleotide duplex consisting of paired sense strand and antisense strand, wherein
[0023] (1) the sense strand comprises a sequence set forth in SEQ ID NO: 1 or a fragment thereof, or a modified sequence of the sequence or the fragment thereof; and the antisense strand comprises a sequence set forth in SEQ ID NO: 13 or a fragment thereof, or a modified sequence of the sequence or the fragment thereof;
[0024] (2) the sense strand comprises a sequence set forth in SEQ ID NO: 2 or a fragment thereof, or a modified sequence of the sequence or the fragment thereof; and the antisense strand comprises a sequence set forth in SEQ ID NO: 14 or a fragment thereof, or a modified sequence of the sequence or the fragment thereof;
[0025] (3) the sense strand comprises a sequence set forth in SEQ ID NO: 3 or a fragment thereof, or a modified sequence of the sequence or the fragment thereof; and the antisense strand comprises a sequence set forth in SEQ ID NO: 15 or a fragment thereof, or a modified sequence of the sequence or the fragment thereof;
[0026] (4) the sense strand comprises a sequence set forth in SEQ ID NO: 4 or a fragment thereof, or a modified sequence of the sequence or the fragment thereof; and the antisense strand comprises a sequence set forth in SEQ ID NO: 16 or a fragment thereof, or a modified sequence of the sequence or the fragment thereof;
[0027] (5) the sense strand comprises a sequence set forth in SEQ ID NO: 5 or a fragment thereof, or a modified sequence of the sequence or the fragment thereof; and the antisense strand comprises a sequence set forth in SEQ ID NO: 17 or a fragment thereof, or a modified sequence of the sequence or the fragment thereof;
[0028] (6) the sense strand comprises a sequence set forth in SEQ ID NO: 6 or a fragment thereof, or a modified sequence of the sequence or the fragment thereof; and the antisense strand comprises a sequence set forth in SEQ ID NO: 18 or a fragment thereof, or a modified sequence of the sequence or the fragment thereof;
[0029] (7) the sense strand comprises a sequence set forth in SEQ ID NO: 7 or a fragment thereof, or a modified sequence of the sequence or the fragment thereof; and the antisense strand comprises a sequence set forth in SEQ ID NO: 19 or a fragment thereof, or a modified sequence of the sequence or the fragment thereof;
[0030] (8) the sense strand comprises a sequence set forth in SEQ ID NO: 8 or a fragment thereof, or a modified sequence of the sequence or the fragment thereof; and the antisense strand comprises a sequence set forth in SEQ ID NO: 20 or a fragment thereof, or a modified sequence of the sequence or the fragment thereof;
[0031] (9) the sense strand comprises a sequence set forth in SEQ ID NO: 9 or a fragment thereof, or a modified sequence of the sequence or the fragment thereof; and the antisense strand comprises a sequence set forth in SEQ ID NO: 21 or a fragment thereof, or a modified sequence of the sequence or the fragment thereof;
[0032] (10) the sense strand comprises a sequence set forth in SEQ ID NO: 10 or a fragment thereof, or a modified sequence of the sequence or the fragment thereof; and the antisense strand comprises a sequence set forth in SEQ ID NO: 22 or a fragment thereof, or a modified sequence of the sequence or the fragment thereof;
[0033] (11) the sense strand comprises a sequence set forth in SEQ ID NO: 11 or a fragment thereof, or a modified sequence of the sequence or the fragment thereof; and the antisense strand comprises a sequence set forth in SEQ ID NO: 23 or a fragment thereof, or a modified sequence of the sequence or the fragment thereof; or
[0034] (12) the sense strand comprises a sequence set forth in SEQ ID NO: 12 or a fragment thereof, or a modified sequence of the sequence or the fragment thereof; and the antisense strand comprises a sequence set forth in SEQ ID NO: 24 or a fragment thereof, or a modified sequence of the sequence or the fragment thereof.

[0035] In another aspect, the present disclosure further provides a conjugate for reducing PCSK9 expression, comprising the double-stranded RNAi agent and a ligand conjugated thereto.

[0036] In another aspect, the present disclosure further provides a pharmaceutical composition, comprising the double-stranded RNAi agent or the conjugate, and a pharmaceutically acceptable carrier.

[0037] In another aspect, the present disclosure further provides use of the aforementioned double-stranded RNAi agent, the conjugate or the pharmaceutical composition in the manufacture of a medicament for treating a PCSK9-related disease.

[0038] In another aspect, the present disclosure further provides a method for treating or preventing a diseases or condition that can be modulated by downregulating PCSK9 gene expression.

[0039] The beneficial effects achieved by the present disclosure are at least as follows:

[0040] (1) Unmodified sequences, including basic sequences 5, 51, 81, 82, 84, 3, 8, 9, 21, 31, 73 and 83, all exhibit a significant inhibitory effect on PCSK9, with the highest inhibition rate exceeding 60%.

[0041] (2) The inhibition rate of sequences with multiple modifications reaches up to 90% or more. Moreover, the modified sequence conjugated with a GalNAc compound can be efficiently delivered to the animal liver, markedly inhibiting PCSK9 gene expression, substantially reducing low-density lipoprotein cholesterol (LDL-C) levels in serum, and significantly reducing total cholesterol (TC) levels in serum.

[0042] (3) Each sequence modified by alternate modifications and template modifications of the present disclosure has significantly improved inhibitory activity against PCSK9, exhibiting up to 40% improvement compared with the unmodified sequences which are either identical to or have very little difference from the sequences disclosed in the prior art.

[0043] (4) The present disclosure finds that siRNAs with similar sequences exhibit markedly disparate activities, irrespective of whether they are unmodified or alternately modified. For example, the inhibition rate of the unmodified basic sequence 5 is 51.2% higher than that of the basic sequence 4, and the inhibition rate of the alternately modified sequence P92-si5 is 61.8% higher than that of P92-si4, which represents a significant improvement.

[0044] (5) The present disclosure also reveals that different sequences exhibit disparate effects on activity after alternate modifications. Some inhibition rates demonstrate a notable enhancement, exemplified by basic sequence 5, whose alternately modified sequence exhibits an elevated inhibition rate of 12.4% relative to its unmodified sequence. Some inhibition rates exhibit a less pronounced alteration, for example, as observed in basic sequences 4, 22, and 52, the inhibition rates of alternately modified and unmodified sequences exhibit minimal deviation.

### BRIEF DESCRIPTION OF DRAWINGS

[0045] In order to more clearly illustrate the technical solutions of the embodiments of the present disclosure, the drawings of the embodiments will be briefly introduced below. Obviously, the drawings in the following description only relate to some embodiments of the present disclosure and do not limit the present disclosure.

[0046] FIG. 1 shows alternately modified sequences that have a significant inhibitory effect on the PCSK9 gene, with an inhibition rate higher than 50%.

[0047] FIG. 2 shows alternately modified sequences with an inhibition rate against the PCSK9 gene between 30% and 50%.

[0048] FIG. 3 shows alternately modified sequences with an inhibition rate against the PCSK9 gene less than 30%.

[0049] FIG. 4 shows alternately modified sequences with an inhibition rate against the PCSK9 gene less than 30%.

[0050] FIG. 5 shows unmodified sequences that have a significant inhibitory effect on the PCSK9 gene, with an inhibition rate higher than 50%.

[0051] FIG. 6 shows unmodified sequences with an inhibition rate against the PCSK9 gene less than 40%.

[0052] FIG. 7 shows the inhibition rates against the PCSK9 gene by basic sequence 5 modified with different template modifications.

[0053] FIG. 8 shows the inhibition rates against the PCSK9 gene by basic sequences 5, 51, 81 and 84 modified with template modification, anti-off-target or/and 5′-E-VP modification.

[0054] FIG. 9 shows the inhibition rates of the PCSK9 protein in animal serum by basic sequences 5, 51, 81, 82 and 84 modified with different schemes and conjugated with a GalNAc compound.

[0055] FIG. 10 shows the reduction levels of low-density lipoprotein cholesterol (LDL-C) in animal serum by basic sequences 5, 51, 81, 82 and 84 modified with different schemes and conjugation with a GalNAc compound.

[0056] FIG. 11 shows the reduction levels of total cholesterol (TC) in animal serum by basic sequences 5, 51, 81, 82 and 84 modified with different schemes and conjugated with a GalNAc compound.

### DETAILED DESCRIPTION

[0057] In order to make the present disclosure more easily understood, certain terms are first defined. In addition, it should be noted that whenever a value or a range of values for a parameter is listed, it is intended to indicate that the intermediate values and ranges of these cited values are also intended to be part of the present disclosure.

[0058] As used herein, the articles “a” and “an” refer to one or more than one (i.e., at least one) of the grammatical object of the article. By way of example, “an element” refers to one element or more than one element, such as a plurality of elements.

[0059] The term “including” is used herein to mean, and is used interchangeably with, the phrase “including, but not limited to.”

[0060] The term “or” is used herein to mean, and is used interchangeably with, the term “and/or,” unless the context clearly dictates otherwise.

[0061] As used herein, the term “about” or “approximately” as applied to one or more target values refers to a value similar to the reference value. In certain embodiments, unless otherwise specified or in addition apparent from the context, the term “about” or “approximately” refers to a range of values falling into 20%, 19%, 18%, 17%, 16%, 15%, 14%, 13%, 12%, 11%, 10%, 9%, 8%, 7%, 6%, 5%, 4%, 3%, 2%, 1% or less in either direction (greater than or less than) of the reference value (unless such numeral will exceed 100% of a possible value).

[0062] As used herein, “PCSK9” refers to the proprotein convertase subtilisin Kexin 9 gene or protein.

[0063] “G”, “C”, “A” and “U” each generally represent nucleotides comprising guanine, cytosine, adenine and uracil as bases, respectively. “T” and “dT” are used interchangeably herein and refer to deoxyribonucleotides in which the nucleobase is thymine, such as deoxyribothymine, 2′-deoxythymidine or thymidine. However, it should be understood that the term “ribonucleotide” or “nucleotide” or “deoxyribonucleotide” may also refer to a modified nucleotide (as further described below) or an alternative replacement moiety. The skilled person will be well aware that guanine, cytosine, adenine and uracil may be replaced by other moieties without substantially changing the base pairing properties of an oligonucleotide (including a nucleotide having such a replacement moiety). For example, without limitation, a nucleotide comprising inosine as its base may base pair with a nucleotide comprising adenine, cytosine or uracil. Thus, a nucleotide comprising uracil, guanine or adenine may be replaced in the nucleotide sequences of the present disclosure by a nucleotide comprising, for example, inosine. Sequences comprising such replacement moieties are embodiments of the present disclosure.

[0064] The terms “RNAi agent”, “iRNA”, “iRNA agent”, and “RNA interference agent” are used interchangeably herein and refer to RNA agents as defined herein, which mediate targeted cleavage of RNA transcripts through the RNA induced silencing complex (RISC) pathway. RNAi directs sequence-specific degradation of mRNA through a process known as RNA interference (RNAi). RNAi regulates, e.g., inhibits, expression of PCSK9 in cells such as cells in a subject (e.g., a mammalian subject). RNAi molecules include single-stranded RNAi molecules and double-stranded siRNAs, as well as short hairpin RNAs (shRNAs).

[0065] The term “small interfering ribonucleic acid” or “siRNA” refers to a small interfering ribonucleic acid RNAi molecule. It is a class of double-stranded RNA molecules, also referred to in the art as short interfering RNA or silencing RNA. siRNAs typically comprise a sense strand (also referred to as a passenger strand) and an antisense strand (also referred to as a guide strand), and each strand is 17 to 30 nucleotides in length, typically 19 to 25 nucleosides in length. The antisense strand is complementary (such as at least 95% complementary, such as fully complementary) to the target nucleic acid (suitably a mature mRNA sequence), and the sense strand is complementary to the antisense strand, such that the sense strand and the antisense strand form a duplex or duplex region. The siRNA strand may form a blunt-ended duplex, or preferably, the 3′-ends of the sense and antisense strands may form a 3′ overhang of, for example, 1, 2 or 3 nucleosides, similar to the product produced by Dicer, which may form a RISC substrate in vivo. Effective extended forms of Dicer substrates have been described in U.S. Pat. Nos. 8,349,809 and 8,513,207, which are incorporated herein by reference. In some embodiments, both the sense and antisense strands have 2 nt 3′ overhangs. Thus, the length of the duplex region may be, for example, 17 to 25 nucleotides, such as 21 to 23 nucleotides in length.

[0066] The term “antisense strand” refers to a strand of RNAi (e.g., dsRNA) that includes a region that is substantially complementary to a target sequence. As used herein, the term “complementarity region” refers to a region on the antisense strand that is substantially complementary to the sequence as defined herein (e.g., a target sequence). When the complementary region is not completely complementary to the target sequence, mispairing may be in the interior or terminal regions of the molecule. Typically, the most tolerated mispairing is in the terminal regions, e.g., within 5, 4, 3, or 2 nucleotides at the 5′ and/or 3′-ends.

[0067] The term “sense strand” as used herein refers to the strand of RNAi that includes a region that is substantially complementary to a region of the antisense strand (as that term is defined herein).

[0068] As used herein, the term “inhibit” may be used interchangeably with “reduce,” “silence,” “downregulate,” “suppress,” and other similar terms, and includes any level of inhibition.

[0069] As used herein, the phrase “inhibiting PCSK9 expression” includes inhibiting the expression of any PCSK9 gene (such as, for example, a mouse PCSK9 gene, a rat PCSK9 gene, a monkey PCSK9 gene, or a human PCSK9 gene) and a variant (such as a naturally occurring variant) or mutant of a PCSK9 gene. Thus, the PCSK9 gene can be a wild-type PCSK9 gene, a mutant PCSK9 gene, or a transgenic PCSK9 gene in the context of a genetically manipulated cell, cell group, or organism.

[0070] “Inhibiting PCSK9 gene expression” includes any level of inhibition against the PCSK9 gene, such as at least partial inhibition of the expression of the PCSK9 gene, such as inhibition of at least about 5%, at least about 10%, at least about 15%, at least about 20%, at least about 25%, at least about 30%, at least about 35%, at least about 40%, at least about 45%, at least about 50%, at least about 55%, at least about 60%, at least about 65%, at least about 70%, at least about 75%, at least about 80%, at least about 85%, at least about 90%, at least about 91%, at least about 92%, at least about 93%, at least about 94%, at least about 95%, at least about 96%, at least about 97%, at least about 98%, or at least about 99%.

[0071] Based on any variable level associated with PCSK9 gene expression, such as PCSK9 mRNA level, PCSK9 protein level, or serum lipid level, the expression of PCSK9 gene can be assessed. Inhibition can be assessed by the reduction of one or more of these variables in absolute or relative levels compared to a control level. A control level can be any type of control level utilized in the art, such as a baseline level before administration or a level determined from a similar untreated or control (e.g., only a buffer control or an inert agent control) treated subject, cell, or sample.

[0072] As used herein, “patient” or “subject” is intended to include humans or non-human animals, preferably mammals, such as monkeys. Most preferably, the subject or patient is a human.

[0073] As used herein, “PCSK9-related diseases” are intended to include any disease associated with the PCSK9 gene or protein. Such diseases may be caused, for example, by overproduction of PCSK9 protein, by PCSK9 gene mutations, by abnormal cleavage of PCSK9 protein, by abnormal interactions between PCSK9 and other proteins or other endogenous or exogenous substances. Exemplary PCSK9-related diseases include lipidemias, such as hyperlipidemia, and other forms of lipid imbalances, such as hypercholesterolemia, hypertriglyceridemia, and pathological conditions associated with these disorders, such as heart and circulatory system diseases.

[0074] As used herein, “therapeutically effective amount” is intended to include an amount of an RNAi agent sufficient to achieve treatment of a PCSK9-related disease (e.g., by attenuating, ameliorating, or maintaining the existing disease or one or more symptoms of the disease) when administered to a patient. The “therapeutically effective amount” may vary depending on the RNAi agent, how the agent is administered, the disease and its severity, medical history, age, weight, family history, genetic makeup, the stage of the pathological process mediated by PCSK9 expression, the type of previous or concomitant therapy (if any), and other individual characteristics of the patient to be treated.

[0075] As used herein, a “prophylactically effective amount” is intended to include an amount of an RNAi agent sufficient to prevent or ameliorate a PCSK9-related disease or one or more symptoms of the disease when administered to a subject who has not yet experienced or shown symptoms of the disease but may be susceptible to the disease. Ameliorating the disease includes slowing the progression of the disease or reducing the severity of a subsequent disease. The “prophylactically effective amount” may vary depending on the RNAi agent, how the agent is administered, the degree of risk of the disease, medical history, age, weight, family history, genetic makeup, the type of previous or concomitant therapy (if any), and other individual characteristics of the patient to be treated.

[0076] “Therapeutically effective amount” or “prophylactically effective amount” also includes an amount of an RNAi agent that produces a certain desired local or systemic effect at a reasonable benefit/risk ratio applicable to any treatment. The RNAi agent used in the method of the present disclosure can be administered in an amount sufficient to produce a reasonable benefit/risk ratio applicable to such treatment.

[0077] As used herein, the term “sample” includes similar fluids, cells or tissues separated from a subject, and a collection of fluids, cells or tissues present in a subject. Examples of biological fluids include blood, serum and serosal fluid, plasma, cerebrospinal fluid, ocular fluid, lymph, urine, saliva, etc. Tissue samples may include samples from tissues, organs or local areas. For example, a sample may be derived from a specific organ, an organ part or a fluid or cell from these organs. In certain embodiments, a sample may be derived from liver (for example, the whole liver or some segments of liver, or some types of cells in the liver, for example, hepatocytes). In a preferred embodiment, “sample derived from a subject” refers to blood or plasma extracted from the subject. In some other embodiments, “sample derived from a subject” refers to liver tissue (or its subcomponent) derived from the subject.

[0078] In an aspect, the present disclosure provides a double-stranded RNAi agent for reducing PCSK9 expression, comprising an oligonucleotide duplex selected from any one of the following paired sense strand and antisense strand, wherein
[0079] (1) the sense strand has a sequence set forth in SEQ ID NO: 1 or a fragment thereof, or a modified sequence of the sequence or the fragment thereof; and the antisense strand has a sequence set forth in SEQ ID NO: 13 or a fragment thereof, or a modified sequence of the sequence or the fragment thereof;
[0080] (2) the sense strand has a sequence set forth in SEQ ID NO: 2 or a fragment thereof, or a modified sequence of the sequence or the fragment thereof; and the antisense strand has a sequence set forth in SEQ ID NO: 14 or a fragment thereof, or a modified sequence of the sequence or the fragment thereof;
[0081] (3) the sense strand has a sequence set forth in SEQ ID NO: 3 or a fragment thereof, or a modified sequence of the sequence or the fragment thereof; and the antisense strand has a sequence set forth in SEQ ID NO: 15 or a fragment thereof, or a modified sequence of the sequence or the fragment thereof;
[0082] (4) the sense strand has a sequence set forth in SEQ ID NO: 4 or a fragment thereof, or a modified sequence of the sequence or the fragment thereof; and the antisense strand has a sequence set forth in SEQ ID NO: 16 or a fragment thereof, or a modified sequence of the sequence or the fragment thereof;
[0083] (5) the sense strand has a sequence set forth in SEQ ID NO: 5 or a fragment thereof, or a modified sequence of the sequence or the fragment thereof; and the antisense strand has a sequence set forth in SEQ ID NO: 17 or a fragment thereof, or a modified sequence of the sequence or the fragment thereof;
[0084] (6) the sense strand has a sequence set forth in SEQ ID NO: 6 or a fragment thereof, or a modified sequence of the sequence or the fragment thereof; and the antisense strand has a sequence set forth in SEQ ID NO: 18 or a fragment thereof, or a modified sequence of the sequence or the fragment thereof;
[0085] (7) the sense strand has a sequence set forth in SEQ ID NO: 7 or a fragment thereof, or a modified sequence of the sequence or the fragment thereof; and the antisense strand has a sequence set forth in SEQ ID NO: 19 or a fragment thereof, or a modified sequence of the sequence or the fragment thereof;
[0086] (8) the sense strand has a sequence set forth in SEQ ID NO: 8 or a fragment thereof, or a modified sequence of the sequence or the fragment thereof; and the antisense strand has a sequence set forth in SEQ ID NO: 20 or a fragment thereof, or a modified sequence of the sequence or the fragment thereof;
[0087] (9) the sense strand has a sequence set forth in SEQ ID NO: 9 or a fragment thereof, or a modified sequence of the sequence or the fragment thereof; and the antisense strand has a sequence set forth in SEQ ID NO: 21 or a fragment thereof, or a modified sequence of the sequence or the fragment thereof;
[0088] (10) the sense strand has a sequence set forth in SEQ ID NO: 10 or a fragment thereof, or a modified sequence of the sequence or the fragment thereof; and the antisense strand has a sequence set forth in SEQ ID NO: 22 or a fragment thereof, or a modified sequence of the sequence or the fragment thereof;
[0089] (11) the sense strand has a sequence set forth in SEQ ID NO: 11 or a fragment thereof, or a modified sequence of the sequence or the fragment thereof; and the antisense strand has a sequence set forth in SEQ ID NO: 23 or a fragment thereof, or a modified sequence of the sequence or the fragment thereof; or
[0090] (12) the sense strand has a sequence set forth in SEQ ID NO: 12 or a fragment thereof, or a modified sequence of the sequence or the fragment thereof; and the antisense strand has a sequence set forth in SEQ ID NO: 24 or a fragment thereof, or a modified sequence of the sequence or the fragment thereof.

[0091] In some embodiments, all nucleotides in the sense strand and the antisense strand are modified nucleotides.

[0092] In some embodiments, the double-stranded RNAi agent is an RNAi agent for inhibiting PCSK9 gene expression.

[0093] In some embodiments, the sense strand differs from any one of SEQ ID NOs. 1 to 12 by 1 to 3 nucleotides.

[0094] In some embodiments, the antisense strand differs from any one of SEQ ID NOs. 13 to 24 by 1 to 3 nucleotides.

[0095] In some embodiments, at least one modified nucleotide is selected from the group consisting of: a deoxy-nucleotide, a 3′-end deoxy-thymine (dT) nucleotide, a 2′-O-methyl modified nucleotide, a 2′-fluoro modified nucleotide, a 2′-deoxy-modified nucleotide, a locked nucleotide, a non-locked nucleotide, a conformationally restricted nucleotide, a constrained ethyl nucleotide, an abasic nucleotide, a 2′-amino-modified nucleotide, a 2′-O-allyl-modified nucleotide, a 2′-C-alkyl-modified nucleotide, a 2′-hydroxy-modified nucleotide, a 2′-methoxyethyl-modified nucleotide, a 2′-O-alkyl-modified nucleotide, a morpholino nucleotide, a phosphoramidate, a nucleotide comprising a non-natural base, a tetrahydropyran-modified nucleotide, a 1,5-anhydrohexitol-modified nucleotide, a cyclohexenyl-modified nucleotide, a nucleotide comprising phosphorothioate, a nucleotide comprising methylphosphonate, a nucleotide comprising a 5′-phosphate, and a nucleotide comprising a 5′-phosphate mimic.

[0096] In some embodiments, at least one strand comprises a 3′ overhang of at least 1 nucleotide.

[0097] In some embodiments, at least one strand comprises a 3′ overhang of at least 2 nucleotides.

[0098] In some embodiments, the double-stranded region is from 15 to 30 nucleotide pairs in length.

[0099] In some embodiments, the double-stranded region is from 17 to 25 nucleotide pairs in length.

[0100] In some embodiments, the double-stranded region is from 19 to 23 nucleotide pairs in length.

[0101] In some embodiments, the double-stranded region is from 21 nucleotide pairs in length.

[0102] In some embodiments, each strand has 15 to 30 nucleotides.

[0103] In some embodiments, each strand has 19 to 25 nucleotides.

[0104] In some embodiments, the sense strand has 21 nucleotides and the antisense strand has 23 nucleotides.

[0105] In some embodiments, all nucleotides in the sense strand and the antisense strand are modified with a chemical modification on the 2′ position of the ribose of the nucleotide.

[0106] In some embodiments, the chemical modification on the 2′ position of the ribose of the nucleotide is selected from the group consisting of 2′-methoxy, 2′-methoxyethyl, 2′-fluoro, 2′-benzyloxy, 2′-methylcarbonylamino, 2′-pyridylmethoxy, and a combination thereof.

[0107] In some embodiments, the chemical modification on the 2′ position of the ribose of the nucleotide is a combination of 2′-methoxy and 2′-fluoro.

[0108] In some embodiments, the chemical modification on the 2′ position of the ribose of the nucleotide is alternate 2′-methoxy and 2′-fluoro.

[0109] In some embodiments, for the chemical modification on the 2′ position of the ribose of the nucleotide, the nucleotides in the sense strand are modified with 2′-fluoro in odd-numbered positions and with 2′-methoxy in even-numbered positions, and the nucleotides in the antisense strand are modified with 2′-methoxy in odd-numbered positions and with 2′-fluoro in even-numbered positions.

[0110] In some embodiments, nucleotide monomers are connected by a 3′,5′-phosphodiester bond.

[0111] In some embodiments, nucleotide monomers are connected by a 3′,5′-phosphodiester bond with thio-modification.

[0112] In some embodiments, the aforementioned oligonucleotides comprises the following modifications:

[0113] the antisense strand is modified with modifications selected from the group consisting of A, B and C:

| | Antisense strand (AS) 5′-3′ | | | | | | | | | | | |
|---|---|---|---|---|---|---|---|---|---|---|---|---|
| No. | 1 | 2 | 3 | 4 | 5 | 6 | 7 | 8 | 9 | 10 | 11 | 12 |
| A | 2′-OMe + PS | 2′-F + PS | 2′-OMe | 2′-OMe | 2′-OMe | 2′-F | 2′-OMe | 2′-OMe | 2′-OMe | 2′-OMe | 2′-OMe | 2′-OMe |
| B | 2′-OMe + PS | 2′-F + PS | 2′-F | 2′-F | 2′-OMe | 2′-F | 2′-OMe | 2′-OMe | 2′-OMe | 2′-OMe | 2′-OMe | 2′-OMe |
| C | 2′-OMe + PS | 2′-F + PS | 2′-OMe | 2′-F | 2′-F | 2′-F | 2′-OMe | 2′-OMe | 2′-OMe | 2′-OMe | 2′-OMe | 2′-OMe |

| | Antisense strand (AS) 5′-3′ | | | | | | | | | | |
|---|---|---|---|---|---|---|---|---|---|---|---|
| No. | 13 | 14 | 15 | 16 | 17 | 18 | 19 | 20 | 21 | 22 | 23 |
| A | 2′-OMe | 2′-F | 2′-OMe | 2′-F | 2′-OMe | 2′-OMe | 2′-OMe | 2′-OMe | 2′-OMe + PS | 2′-OMe + PS | 2′-OMe |
| B | 2′-OMe | 2′-F | 2′-OMe | 2′-F | 2′-OMe | 2′-OMe | 2′-OMe | 2′-OMe | 2′-OMe + PS | 2′-OMe + PS | 2′-OMe |
| C | 2′-OMe | 2′-F | 2′-OMe | 2′-F | 2′-OMe | 2′-OMe | 2′-OMe | 2′-OMe | 2′-OMe + PS | 2′-OMe + PS | 2′-OMe |

[0114] the sense strand is modified with modifications selected from the group consisting of a and b:

| | Sense strand (SS) 5′-3′ | | | | | | | | | | |
|---|---|---|---|---|---|---|---|---|---|---|---|
| No. | 1 | 2 | 3 | 4 | 5 | 6 | 7 | 8 | 9 | 10 | 11 |
| a | 2′-OMe + PS | 2′-OMe + PS | 2′-OMe | 2′-OMe | 2′-OMe | 2′-OMe | 2′-F | 2′-OMe | 2′-F | 2′-F | 2′-F |
| b | 2′-OMe + PS | 2′-OMe + PS | 2′-OMe | 2′-OMe | 2′-OMe | 2′-OMe | 2′-F | 2′-OMe | 2′-F | 2′-OMe | 2′-F |

| | Sense strand (SS) 5′-3′ | | | | | | | | | |
|---|---|---|---|---|---|---|---|---|---|---|
| No. | 12 | 13 | 14 | 15 | 16 | 17 | 18 | 19 | 20 | 21 |
| a | 2′-OMe | 2′-OMe | 2′-OMe | 2′-OMe | 2′-OMe | 2′-F | 2′-OMe | 2′-OMe | 2′-OMe | 2′-OMe |
| b | 2′-OMe | 2′-OMe | 2′-OMe | 2′-OMe | 2′-OMe | 2′-F | 2′-OMe | 2′-OMe | 2′-OMe | 2′-OMe |

[0115] in the above tables, 2′-OMe represents 2′-methoxy, 2′-F represents 2′-fluoro, and PS represents a thiophosphate backbone;
[0116] wherein the antisense strand is modified with modification A, and the sense strand is modified with modification a;
[0117] the antisense strand is modified with modification B, and the sense strand is modified with modification a;
[0118] the antisense strand is modified with modification C, and the sense strand is modified with modification a;
[0119] the antisense strand is modified with modification B, and the sense strand is modified with modification b; or
[0120] the antisense strand is modified with modification C, and the sense strand is modified with modification b.

[0121] In some embodiments, the antisense strand is modified with a modification group in the 2-8 positions from the 5′-end, wherein the modification group is selected from the group consisting of UNA, GNA, and DNA, wherein UNA and GNA have the structures of:

[chemical structure]

[0122] wherein the base is selected from the group consisting of adenine, guanine, cytosine, thymine and uracil.

[0123] In some embodiments, the 5′ carbon atom of the glycoside of the 5′-end nucleotide in the modified antisense strand is phosphorylated by a 5′ phosphorylation group selected from the group consisting of 5′-(E)-vinyl phosphonate (5′-E-VP), 5′-methyl phosphonate (5′-MP), 5′-C-methyl phosphate, 5′-thiophosphate (5′-PS), and 5′-phosphate (5′-P), with structures of

[chemical structure]

[0124] wherein, R is selected from the group consisting of hydrogen, hydroxyl, amine, C₁₋₄ alkyl, aryl, C₁₋₄ alkoxy, C₁₋₄ alkylcarbonylamino, and halogen; and
[0125] the base is selected from the group consisting of adenine, guanine, cytosine, thymine and uracil.

[0126] In some embodiments, a 3′,5′-phosphodiester bond connecting nucleotide monomers at an end of the strand has thio-modification and form a chirally pure 3′,5′-thiophosphodiester bond, wherein the 5′-ends of the sense strand and the antisense strand comprise 1-3 thio-modifications as linkages, and the 3′-end of the antisense strand comprises 1-3 thio-modifications as linkages.

[0127] The double-stranded RNA (dsRNA) agent of the present disclosure may optionally be conjugated with one or more ligands. The ligand may be conjugated to the sense strand, antisense strand, or both strands at the 3′-end, 5′-end, or both ends. For example, the ligand may be conjugated to the sense strand. In a preferred embodiment, the ligand is conjugated to the 3′-end of the sense strand. In a preferred embodiment, the ligand is a GalNAc ligand.

[0128] In another aspect, the present disclosure provides a conjugate for reducing PCSK9 expression, comprising the double-stranded RNAi agent and a ligand conjugated thereto.

[0129] In some embodiments, the ligand is conjugated to the 3′-end or the 5′-end of the sense strand of the oligonucleotide duplex.

[0130] In some embodiments, the ligand is one or more GalNAc derivatives attached via a divalent or trivalent branched linker.

[0131] In some embodiments, the ligand is:

[chemical structure]

[0132] wherein X is hydrogen or a hydroxyl protecting group or H, wherein the hydroxyl protecting group is selected from the group consisting of acetyl, benzoyl and isobutyryl; Y is an amine protecting group or H, wherein the amine protecting group is selected from the group consisting of formyl, acetyl, propionyl, n-butyryl and isobutyryl; n is an integer selected from 0-20; and q, r and s are independently integers selected from 1 to 7.

[0133] In some embodiments, the ligand is:

[chemical structure]

[0134] In some embodiments, the ligand is:

[chemical structure]

[0135] wherein, X is selected from the group consisting of oxygen, nitrogen and sulfur;
[0136] Y is alkyl or aryl;
[0137] R₁ is oxygen or sulfur;
[0138] R₂ is selected from the group consisting of hydrogen, amine, C₁₋₄ alkyl, aryl, C₁₋₄ alkoxy and halogen;
[0139] A is selected from the group consisting of —(CH₂)ₐ—, —(CH₂CH₂O)_{b}—, —((CH₂)_{c}NHCO)_{d}—, and —((CH₂)_{c}CONH)_{d}—, wherein a is an integer selected from 1 to 15, b is an integer selected from 1 to 7, c is an integer selected from 1 to 7, and d is an integer selected from 1 to 5;
[0140] B is —(CH₂)ₑ—, wherein e is an integer selected from 0 to 7;
[0141] L is —CONH— or —NHCO—;
[0142] X₁ is —(CH₂)_{f}— or —(CH₂CH₂O)_{f}CH₂—, wherein f is an integer selected from 1 to 5;
[0143] X₂ is —(CH₂)_{g}—, wherein g is an integer selected from 1 to 6;
[0144] Y₁ is 0 or 1;
[0145] Y₂ is 0, 1 or 2;
[0146] Y₃ is 1, 2 or 3;
[0147] m is an integer selected from 0 to 4; and
[0148] n is an integer selected from 0 to 4.

[0149] In some embodiments, the ligand is G4, G5, G6 or G7:

[chemical structure]

[0150] In some embodiments, the conjugate has a structure selected from the group consisting of:

[chemical structure]

[0151] In some embodiments, the double-stranded RNAi agent comprises an oligonucleotide duplex consisting of paired sense strand and antisense strand, wherein
[0152] (1) the sense strand has a sequence set forth in SEQ ID NO: 337; and the antisense strand has a sequence set forth in SEQ ID NO: 427;
[0153] (2) the sense strand has a sequence set forth in SEQ ID NO: 337; and the antisense strand has a sequence set forth in SEQ ID NO: 428;
[0154] (3) the sense strand has a sequence set forth in SEQ ID NO: 342; and the antisense strand has a sequence set forth in SEQ ID NO: 381;
[0155] (4) the sense strand has a sequence set forth in SEQ ID NO: 342; and the antisense strand has a sequence set forth in SEQ ID NO: 430;
[0156] (5) the sense strand has a sequence set forth in SEQ ID NO: 342; and the antisense strand has a sequence set forth in SEQ ID NO: 431;
[0157] (6) the sense strand has a sequence set forth in SEQ ID NO: 347; and the antisense strand has a sequence set forth in SEQ ID NO: 384;
[0158] (7) the sense strand has a sequence set forth in SEQ ID NO: 347; and the antisense strand has a sequence set forth in SEQ ID NO: 437;
[0159] (8) the sense strand has a sequence set forth in SEQ ID NO: 347; and the antisense strand has a sequence set forth in SEQ ID NO: 438;
[0160] (9) the sense strand has a sequence set forth in SEQ ID NO: 348; and the antisense strand has a sequence set forth in SEQ ID NO: 385;
[0161] (10) the sense strand has a sequence set forth in SEQ ID NO: 352; and the antisense strand has a sequence set forth in SEQ ID NO: 448;
[0162] (11) the sense strand has a sequence set forth in SEQ ID NO: 353; and the antisense strand has a sequence set forth in SEQ ID NO: 390;
[0163] (12) the sense strand has a sequence set forth in SEQ ID NO: 353; and the antisense strand has a sequence set forth in SEQ ID NO: 448;
[0164] (14) the sense strand has a sequence set forth in SEQ ID NO: 357; and the antisense strand has a sequence set forth in SEQ ID NO: 393;
[0165] (15) the sense strand has a sequence set forth in SEQ ID NO: 357; and the antisense strand has a sequence set forth in SEQ ID NO: 446; or
[0166] (16) the sense strand has a sequence set forth in SEQ ID NO: 357; and the antisense strand has a sequence set forth in SEQ ID NO: 447;
[0167] wherein, the oligonucleotide duplex is conjugated with ligand G4, G5, G6 or G7.

[0168] In some embodiments, the double-stranded RNAi agent comprises an oligonucleotide duplex consisting of paired sense strand and antisense strand, wherein
[0169] (1) the sense strand has a sequence set forth in SEQ ID NO: 352; and the antisense strand has a sequence set forth in SEQ ID NO: 448;
[0170] (2) the sense strand has a sequence set forth in SEQ ID NO: 353; and the antisense strand has a sequence set forth in SEQ ID NO: 390; or
[0171] (3) the sense strand has a sequence set forth in SEQ ID NO: 353; and the antisense strand has a sequence set forth in SEQ ID NO: 448;
[0172] wherein, the oligonucleotide duplex is conjugated with ligand G4, G5, G6 or G7.

[0173] In some embodiments, the double-stranded RNAi agent comprises an oligonucleotide duplex consisting of paired sense strand and antisense strand, wherein the sense strand has a sequence set forth in SEQ ID NO: 353, the antisense strand has a sequence set forth in SEQ ID NO: 448, and the oligonucleotide duplex is conjugated with ligand G5.

[0174] In another aspect, the present disclosure further provides a pharmaceutical composition, comprising the double-stranded RNAi agent or the conjugate, and a pharmaceutically acceptable carrier.

[0175] In certain embodiments, provided herein is a pharmaceutical composition comprising RNAi as described herein and a pharmaceutically acceptable carrier. The pharmaceutical compositions comprising RNAi is capable of treating a disease or condition associated with the expression or activity of the PCSK9 gene, such as lipid disorders. Such pharmaceutical compositions are formulated based on delivery models. An example is a composition formulated so as to be delivered parenterally, such as by intravenous (IV) delivery for systemic administration. Another example is a composition formulated for direct delivery to the brain parenchyma, such as by infusion to the brain, such as by continuous pump infusion.

[0176] The pharmaceutical composition comprising the RNAi agent of the present disclosure may be, for example, a solution with or without a buffer or a composition comprising a pharmaceutically acceptable carrier. Such compositions include, for example, aqueous or crystalline compositions, liposome formulations, micellar formulations, emulsions, and gene therapy vectors.

[0177] In the method of the present disclosure, the RNAi agent may be administered in a solution. A free RNAi agent may be administered in a non-buffered solution, for example, in physiological saline or in water. Alternatively, the free siRNA may also be administered in a suitable buffer solution. The buffer solution may include acetate, citrate, prolamin, carbonate or phosphate, or any combination thereof. In a preferred embodiment, the buffer solution is phosphate buffered saline (PBS). The pH and volume molar osmotic pressure concentration of the buffer containing the RNAi agent may be adjusted so that it is suitable for administering to a subject.

[0178] In some embodiments, the buffer solution further comprises an agent for controlling the osmolality of the solution so that the osmolality is maintained at a desired value, such as the physiological value of human plasma. Solutes that can be added to the buffer solution to control the osmolality include, but are not limited to, proteins, peptides, amino acids, non-metabolizable polymers, vitamins, ions, sugars, metabolites, organic acids, lipids, or salts. In some embodiments, the agent for controlling the osmolality of the solution is a salt. In certain embodiments, the agent for controlling the osmolality of the solution is sodium chloride or potassium chloride.

[0179] The pharmaceutical composition of the present disclosure may be administered at an amount sufficient to inhibit the expression of the PCSK9 gene. Typically, a suitable amount of the RNAi of the present disclosure is in the range of about 0.001 to about 200.0 mg per kg body weight of the subject per day, typically in the range of about 1 to 50 mg per kg body weight per day. For example, the RNAi agent (e.g., dsRNA) may be administered at about 0.01, 0.05, 0.1, 0.2, 0.3, 0.4, 0.5, 0.6, 0.7, 0.8, 0.9, 1, 1.1, 1.2, 1.3, 1.4, 1.5, 1.6, 1.7, 1.8, 1.9, 2, 2.1, 2.2, 2.3, 2.4, 2.5, 2.6, 2.7, 2.8, 2.9, 3, 3.1, 3.2, 3.3, 3.4, 3.5, 3.6, 3.7, 3.8, 3.9, 4, 4.1, 4.2, 4.3, 4.4, 4.5, 4.6, 4.7, 4.8, 4.9, 5, 5.1, 5.2, 5.3, 5.4, 5.5, 5.6, 5.7, 5.8, 5.9, 6, 6.1, 6.2, 6.3, 6.4, 6.5, 6.6, 6.7, 6.8, 6.9, 7, 7.1, 7.2, 7.3, 7.4, 7.5, 7.6, 7.7, 7.8, 7.9, 8, 8.1, 8.2, 8.3, 8.4, 8.5, 8.6, 8.7, 8.8, 8.9, 9, 9.1, 9.2, 9.3, 9.4, 9.5, 9.6, 9.7, 9.8, 9.9, 10, 10.5, 11, 11.5, 12, 12.5, 13, 13.5, 14, 14.5, 15, 15.5, 16, 16.5, 17, 17.5, 18, 18.5, 19, 19.5, 20, 20.5, 21, 21.5, 22, 22.5, 23, 23.5, 24, 24.5, 25, 25.5, 26, 26.5, 27, 27.5, 28, 28.5, 29, 29.5, 30, 31, 32, 33, 34, 34, 35, 36, 37, 38, 39, 40, 41, 42, 43, 44, 45, 46, 47, 48, 49, or about 50 mg/kg.

[0180] The pharmaceutical composition may be given once a day, or the RNAi may be given twice, three times or more subdoses at appropriate intervals in one day, or even may be given by continuous infusion or delivery through a controlled release formulation. In this case, the RNAi contained in each subdose must be correspondingly less, so as to achieve a daily total dose. The dosage unit may also be compounded for delivery over several days, for example using a conventional sustained release formulation that provides sustained RNAi release over a period of several days. Sustained release formulations are well known in the art and are particularly useful for delivering agents at specific sites, and thus can be used with agents of the present disclosure. In this embodiment, the dosage unit comprises a plurality of corresponding daily doses.

[0181] In some other embodiments, a single dose of the pharmaceutical composition may be long-lasting, so that subsequent doses are administered at intervals of no more than 3, 4, or 5 days or at intervals of no more than 1, 2, 3, or 4 weeks. In some embodiments of the present disclosure, a single dose of the pharmaceutical composition of the present disclosure is administered once a week. In some other embodiments of the present disclosure, a single dose of the pharmaceutical composition of the present disclosure is administered once every two months.

[0182] Those skilled in the art will appreciate that certain factors may affect the dosage and timing required to effectively treat a subject, including, but not limited to, the severity of the disease or condition, previous treatment, the subject's overall health and/or age, and other existing diseases. In addition, treating a subject with a therapeutically effective amount of a composition may include a single treatment or a series of treatments. As described elsewhere herein, the effective amount and in vivo half-life of each RNAi encompassed by the present disclosure may be estimated using conventional methods or based on in vivo testing using appropriate animal models.

[0183] The pharmaceutical compositions of the present disclosure may be administered in a number of ways, depending on whether local or systemic treatment is desired and on the area to be treated. Administration may be topical (e.g., by a skin patch); pulmonary; for example, by inhalation or insufflation of a powder or aerosol, including by a nebulizer; intratracheal; intranasal; epidermal and transdermal, oral or parenteral. Parenteral administration includes intravenous, intraarterial, subcutaneous, intraperitoneal or intramuscular injection or infusion; subdermal, for example, via an implant device; or intracranial, for example, intraparenchymal, intrathecal or intraventricular administration.

[0184] RNAi for use in the compositions and methods of the present disclosure may be formulated for delivery in a membrane molecular assembly such as liposomes or micelles. As used herein, the term “liposome” refers to a vesicle composed of amphiphilic lipids arranged in at least one bilayer (e.g., one or more bilayers). Liposomes include unilayer or multilayer vesicles having a membrane formed from a lipophilic material and an aqueous interior. The aqueous portion contains the RNAi composition. The lipophilic material separates the aqueous interior from the aqueous exterior that does not typically include (although in some instances, it may include) the RNAi composition. Liposomes are useful for transferring active ingredients and delivering them to the site of action. Because the liposome membrane is structurally similar to a biological membrane, when the liposome is applied to a tissue, the liposome bilayer fuses with the bilayer of the cell membrane. As the fusion of the liposome and the cell proceeds, the internal aqueous content comprising the RNAi is delivered to the cell, wherein the RNAi can specifically bind to a target RNA and can mediate RNAi. In some cases, the liposomes are also specifically targeting, for example to direct the RNAi to a particular cell type.

[0185] Liposomes comprising RNAi agents may be prepared by a variety of methods. In an example, the lipid component of the liposome is dissolved in a detergent so that micelles are formed with the lipid component. For example, the lipid component may be an amphipathic cationic lipid or a lipid conjugate. The detergent may have a high critical micelle concentration and may be nonionic. Exemplary detergents include cholate, CHAPS, octyl glucoside, deoxycholate, and lauroyl sarcosine. The RNAi agent formulation is then added to the micelle comprising the lipid component. The cationic group on the lipid interacts with the RNAi agent and condenses around the RNAi agent to form a liposome. After condensation, the detergent is removed, for example, by dialysis to obtain a liposome formulation of the RNAi agent.

[0186] RNAi, such as dsRNA of the present disclosure, may be fully encapsulated in a lipid formulation (e.g., LNP or other nucleic acid-lipid particle).

[0187] As used herein, the term “LNP” refers to a stable nucleic acid-lipid particle. LNP contains a cationic lipid, a non-cationic lipid and a lipid that prevents the particle from gathering (e.g., a PEG-lipid conjugate). LNP is extremely useful for synthetic applications because they demonstrate a prolonged circulation life after intravenous (i.v.) injection and accumulate at distal sites (e.g., at a site physically separated from the site of administration).

[0188] In an embodiment, the ratio of lipid to drug (mass/mass ratio) (e.g., lipid to dsRNA ratio) will be in the range of from about 1:1 to about 50:1, from about 1:1 to about 25:1, from about 3:1 to about 15:1, from about 4:1 to about 10:1, from about 5:1 to about 9:1, or from about 6:1 to about 9:1.

[0189] In some preferred embodiments, the lipid nanoparticles include cationic lipids, neutral lipids, structural lipids, and polymer-conjugated lipids.

[0190] In some preferred embodiments, the cationic lipid is a compound represented by formula (I), or an N-oxide, solvate, pharmaceutically acceptable salt or stereoisomer thereof, wherein G₁ is C₁₋₆ alkylene; G₂ is C₂₋₈ alkylene; G₃ is C₁₋₃ alkylene; L₁ is C₆₋₁₅ linear alkyl; L₂ is C₁₂₋₂₅ branched alkyl. For example, YK-009 of formula (I-I) (see patent CN114044741B).

[chemical structure]

[0191] In some preferred embodiments, the cationic lipid is a compound represented by formula (II), or an N-oxide, solvate, pharmaceutically acceptable salt or stereoisomer thereof, wherein: G1 is C₂₋₈ alkylene; G2 is C₂₋₈ alkylene; L₁ is —C(O)O— or —OC(O)—; L₂ is —C(O)O— or —OC(O)—; R₁ is C₆₋₂₅ linear or branched alkyl; R₂ is C₆₋₂₅ linear or branched alkyl; G₃ is HO(CH₂)₂— or HO(CH₂)₃—; G₄ is HO(CH₂)₂— or HO(CH₂)₃—; L is (CH₂)₂— or —(CH₂)₃— or —(CH₂)₄—. For example, YK-401 of formula (II-I) and YK-402 of formula (II-II) (see patent CN115784921B).

[chemical structure]

[0192] In some preferred embodiments, the cationic lipid is a compound represented by formula (III), or an N-oxide, solvate, pharmaceutically acceptable salt or stereoisomer thereof, wherein: G₁ is C₁₋₆ alkylene; G₂ is C₂₋₈ alkylene; R₁ is C₆₋₂₀ linear or branched alkyl; R₂ is C₁₂₋₂₅ branched alkyl; G₃ is selected from the group consisting of HO(CH₂)₂N(CH₃)(CH₂)₂—, HO(CH₂)₂N(CH₂CH₃)(CH₂)₂—, (HO(CH₂)₂)₂N(CH₂)₂—, CH₃O(CH₂)₂N(CH₃)(CH₂)₂—, (CH₃)₂N(CH₂)₃SC(O)O(CH₂)₂—, (CH₃)₂N(CH₂)₃SC(O)—, CH₃NH(CH₂)₂N(CH₃)(CH₂)₂— and CH₃CH₂NH(CH₂)₂—. For example, YK-201 of formula (III-I) and YK-202 of formula (III-II) (see patent CN115677518B).

[chemical structure]

[0193] In some preferred embodiments, the cationic lipid is a compound represented by formula (IV), or an N-oxide, solvate, pharmaceutically acceptable salt or stereoisomer thereof, wherein G₁ is C₁₋₈ alkylene; G₂ is C₂₋₈ alkylene; R₁ is C₆₋₂₅ linear or branched alkyl; R₂ is C₁₂₋₂₅ linear or branched alkyl; G₃ is HO(CH₂)₂N(R₃)CH₂CH(OH)CH₂—, wherein R₃ is —CH₃, —CH₂CH₃ or —CH₂CH₂OH. For example, YK-305 of formula (IV-I) and YK-310 of formula (IV-II) (see patent CN115745820B).

[chemical structure]

[0194] In some preferred embodiments, the cationic lipid is a compound represented by formula (V), or an N-oxide, solvate, pharmaceutically acceptable salt or stereoisomer thereof, wherein G¹ and G² are each independently unsubstituted C₆-C₁₀ alkylene; G³ is unsubstituted C₁-C₁₂ alkylene; R¹ and R² are each independently C₆-C₂₄ alkyl or C₆-C₂₄ alkenyl; R³ is selected from the group consisting of OR⁵, N, —C(═O)OR⁴, —OC(═O)R⁴ and —NR⁵C(═O)R⁴; R⁴ is a C₁-C₁₂ hydrocarbon group; and R⁵ is H or a C₁-C₆ hydrocarbon group; for example, ALC0315 of formula (V-I) (see patent CN108368028B);

[chemical structure]

[0195] In some preferred embodiments, the cationic lipid is a compound represented by formula (VI), or an N-oxide, solvate, pharmaceutically acceptable salt or stereoisomer thereof, wherein R₄ is —(CH₂)ₙQ or —(CH₂)ₙCHQR; Q is selected from the group consisting of: —OR, —OH, —O(CH₂)ₙN(R)₂, —OC(O)R, —CX₃, —CN, —N(R)C(O)R, —N(H)C(O)R, —N(R)S(O)₂R, —N(H)S(O)₂R, —N(R)C(O)N(R)₂, —N(H)C(O)N(R)₂, —N(H)C(O)N(H)(R), —N(R)C(S)N(R)₂, —N(H)C(S)N(R)₂, —N(H)C(S)N(H)(R), —N(R)S(O)₂R₈ and heterocycle; n is 1, 2 or 3; each R is independently selected from the group consisting of: C₁₋₃ alkyl, C₂₋₃ alkenyl, (CH₂)_{q}OR* and H, and each q is independently selected from 1, 2 and 3, each R* is independently selected from the group consisting of: C₁₋₁₂ alkyl and C₂₋₁₂ alkenyl; each X is independently selected from the group consisting of: F, Cl, Br and I; for example, SM102 of formula (VI-I) (see patent CN110520409A).

[chemical structure]

[0196] In some preferred embodiments, the cationic lipid is a compound represented by formula (VII), or an N-oxide, solvate, pharmaceutically acceptable salt or stereoisomer thereof (see CN102625696B, DLIN-MC3-DMA),

[chemical structure]

[0197] In some more preferred embodiments, the cationic lipid includes YK-009, YK-401, YK-305, ALC0315, SM102, and DLIN-MC3-DMA.

[0198] In some preferred embodiments, the molar ratio of the cationic lipid to the neutral lipid is 1:1 to 10:1.

[0199] In some preferred embodiments, the molar ratio of the cationic lipid to the structural lipid is 1:1 to 5:1.

[0200] In some preferred embodiments, the molar ratio of the cationic lipid, the neutral lipid, the structural lipid, and the polymer conjugated lipid is (25-65):(5-25):(25-70):(0.5-5).

[0201] In some preferred embodiments, the molar ratio of the cationic lipid, the neutral lipid, the structural lipid, and the polymer conjugated lipid is (25-65):(5-25):(25-45):(0.5-5).

[0202] In some more preferred embodiments, the molar ratio of the cationic lipid, the neutral lipid, the structural lipid, and the polymer-conjugated lipid is 50:10:38.5:1.5 or 49:10:39.5:1.5.

[0203] In some preferred embodiments, the neutral lipid is selected from the group consisting of phosphatidylcholine, phosphatidylethanolamine, sphingomyelin, ceramide, sterol and derivatives thereof.

[0204] In some more preferred embodiments, the neutral lipid is selected from the group consisting of: 1,2-dilinoleoyl-sn-glycero-3-phosphocholine (DLPC), 1,2-dimyristoyl-sn-glycero-phosphocholine (DMPC), 1,2-dioleoyl-sn-glycero-3-phosphocholine (DOPC), 1,2-dipalmitoyl-sn-glycero-3-phosphocholine (DPPC), 1,2-distearoyl-sn-glycero-3-phosphocholine (DSPC), 1,2-diundecanoyl-sn-glycero-phosphocholine (DUPC), 1-palmitoyl-2-oleoyl-sn-glycero-3-phosphocholine (POPC), 1,2-di-O-octadecenyl-sn-glycero-3-phosphocholine (18:0 Diether PC), 1-oleoyl-2-cholesterylhemisuccinoyl-sn-glycero-3-phosphocholine (OChemsPC), Lyso 1-hexadecyl-sn-glycero-3-phosphocholine (C16 PC), 1,2-dilinolenoyl-sn-glycero-3-phosphocholine, 1,2-diarachidonoyl-sn-glycero-3-phosphocholine, 1,2-didocosahexaenoyl-sn-glycero-3-phosphocholine, 1,2-dioleoyl-sn-glycero-3-phosphoethanolamine (DOPE), 1,2-diphytanoyl-sn-glycero-3-phosphoethanolamine (ME 16.0 PE), 1,2-distearoyl-sn-glycero-3-phosphoethanolamine, 1,2-dilinoleoyl-sn-glycero-3-phosphoethanolamine, 1,2-dilinolenoyl-sn-glycero-3-phosphoethanolamine, 1,2-diarachidonoyl-sn-glycero-3-phosphoethanolamine, 1,2-didocosahexaenoyl-sn-glycero-3-phosphoethanolamine, 1,2-dioleoyl-sn-glycero-3-phospho-rac-(1-glycerol) sodium salt (DOPG), dipalmitoyl phosphatidylglycerol (DPPG), palmitoyl oleoyl phosphatidylethanolamine (POPE), distearoyl-phosphatidyl-ethanolamine (DSPE), dipalmitoyl phosphatidylethanolamine (DPPE), dimyristoyl phosphoethanolamine (DMPE), 1-stearyl-2-oleoyl-stearoylethanolamine (SOPE), 1-stearoyl-2-oleoyl-phosphatidylcholine (SOPC), sphingomyelin, phosphatidylcholine, phosphatidylethanolamine, phosphatidylserine, phosphatidylinositol, phosphatidic acid, palmitoyl oleoyl phosphatidylcholine, lysophosphatidylcholine, lysophosphatidylethanolamine (LPE), and mixtures thereof.

[0205] In some more preferred embodiments, the neutral lipid is DOPE and/or DSPC.

[0206] In some preferred embodiments, the structural lipid is selected from the group consisting of: cholesterol, non-sterol, sitosterol, ergosterol, campesterol, stigmasterol, brassicasterol, tomatine, ursolic acid, α-tocopherol, corticosteroid, and a mixture thereof.

[0207] In some more preferred embodiments, the structural lipid is cholesterol.

[0208] In some preferred embodiments, the polymer-conjugated lipid is selected from the group consisting of: PEG-modified phosphatidylethanolamine, PEG-modified phosphatidic acid, PEG-modified ceramide, PEG-modified dialkylamine, PEG-modified diacylglycerol, PEG-modified dialkylglycerol, and a mixture thereof.

[0209] In some more preferred embodiments, the polymer conjugated lipid is selected from the group consisting of: distearoylphosphatidylethanolamine polyethylene glycol 2000 (DSPE-PEG2000), dimyristoylglycerol-3-methoxy polyethylene glycol 2000 (DMG-PEG2000) and methoxy polyethylene glycol ditetradecanoyl acetamide (ALC-0159).

[0210] The pharmaceutical compositions of the present disclosure include, but are not limited to, solutions, emulsions, and liposome-containing formulations. These compositions may be produced from a variety of components, including, but not limited to, preformed liquids, self-emulsifying solids, and self-emulsifying semisolids. Particularly preferred are formulations that target the liver when treating liver disorders (e.g., liver cancer).

[0211] The pharmaceutical formulations of the present disclosure, which can conveniently be in unit dosage form, may be prepared according to conventional techniques well known in the pharmaceutical industry. Such techniques include the steps of combining the active ingredients with the pharmaceutical carrier(s) or excipient(s). Generally speaking, the formulations are prepared by uniformly and finely combining the active ingredients with liquid carriers or finely dispersed solid carriers or both, and, if desired, shaping the product.

[0212] The compositions of the present disclosure can be formulated into any one of many possible dosage forms, such as but not limited to tablets, capsules, gel capsules, liquid syrups, soft capsules, suppositories and enemas. The compositions of the present disclosure can also be formulated into suspensions in aqueous, non-aqueous media or mixed media. Aqueous suspensions can further include materials that increase the viscosity of the suspension, and such materials include, for example, sodium carboxymethylcellulose, sorbitol and/or dextran. The suspension may also include a stabilizer.

[0213] Certain compositions of the present disclosure also incorporate carrier compounds into the formulation. As used herein, a “carrier compound” or “carrier” may refer to a nucleic acid or its analog, which is inert (i.e., not biologically active per se), but is considered to be a nucleic acid in an in vivo process, such as by degrading biologically active nucleic acids or promoting their removal from circulation to reduce the bioavailability of biologically active nucleic acids. Co-administration of nucleic acids and carrier compounds (generally an excess of the latter substance) can result in a significant reduction in the amount of nucleic acids recovered in the liver, kidneys, or other external circulation reservoirs, assuming that competition for common receptors between the carrier compound and the nucleic acid is due. For example, the recovery of partially phosphorothioated dsRNA in liver tissue can be reduced when it is co-administered with polyinosinic acid, dextran sulfate, polycytidylic acid, or 4-acetamido-4′stilbene isothiocyanate-2,2′-disulfonic acid.

[0214] In contrast to carrier compounds, a “pharmaceutical carrier” or “excipient” is a pharmaceutically acceptable solvent, suspending agent, or any other pharmaceutically inert vehicle for delivering one or more nucleic acids to an animal. The excipient may be liquid or solid, and when combined with the nucleic acid and other components of a particular pharmaceutical composition, the excipient is selected to provide the desired volume, thickness, etc., with reference to the intended mode of administration. Typical pharmaceutical carriers include, but are not limited to, binders (e.g., pregelatinized corn starch, polyvinyl pyrrolidone, or hydroxypropyl methylcellulose); fillers (e.g., lactose and other sugars, microcrystalline cellulose, pectin, gelatin, calcium sulfate, ethyl cellulose, polyacrylates, or calcium hydrogen phosphate); lubricants (e.g., magnesium stearate, talc, silicon dioxide, colloidal silicon dioxide, stearic acid, metal stearates, hydrogenated vegetable oils, corn starch, polyethylene glycol, sodium benzoate, sodium acetate); disintegrants (e.g., starch, sodium starch glycolate); and wetting agents (e.g., sodium lauryl sulfate).

[0215] Pharmaceutically acceptable organic or inorganic excipients suitable for non-parenteral administration, which do not react toxically with nucleic acids, can also be used to prepare the compositions of the present disclosure. Suitable pharmaceutically acceptable carriers include, but are not limited to, water, saline solution, alcohol, polyethylene glycol, gelatin, lactose, amylose, magnesium stearate, talc, silicic acid, viscous paraffin, hydroxymethylcellulose, or polyvinyl pyrrolidone.

[0216] The formulation for local administration of nucleic acid can include aseptic or non-sterile aqueous solution, non-aqueous solution in common solvent such as alcohol, or nucleic acid solution in liquid or solid oil matrix. These solutions can also include buffer, diluent and other suitable additives. Pharmaceutically acceptable organic or inorganic excipients suitable for non-parenteral administration, which do not react toxically with nucleic acids, can be used.

[0217] Suitable pharmaceutically acceptable excipients include, but are not limited to, water, saline solution, alcohol, polyethylene glycol, gelatin, lactose, amylose, magnesium stearate, talc, silicic acid, viscous paraffin, hydroxymethylcellulose, or polyvinyl pyrrolidone.

[0218] The dosage form, carrier compound, drug carrier, excipient, etc. of the above-mentioned composition are described in U.S. patent Ser. No. 10/125,369B2, which is incorporated herein by reference.

[0219] The present disclosure further provides a method for treating or preventing diseases and conditions that can be regulated by down-regulating PCSK9 gene expression. For example, the RNAi agents described herein can be used to treat lipidemia, such as hyperlipidemia, and other forms of lipid imbalance, such as hypercholesterolemia, hypertriglyceridemia, and pathological conditions associated with these disorders, such as heart and circulatory system diseases. Other diseases and conditions that can be regulated by down-regulating PCSK9 gene expression include lysosomal storage diseases, including but not limited to Niemann-Pick disease, Tay-Sachs disease, lysosomal acid lipase deficiency, and Gaucher disease. The RNAi agents described herein can be used to treat cardiovascular diseases such as coronary heart disease (CHD), cerebrovascular disease (CVD), aortic valve stenosis, peripheral vascular disease, atherosclerosis, arteriosclerosis, myocardial infarction (heart attack), cerebrovascular disease (stroke), transient ischemic attack (TIA), angina (stable and unstable), atrial fibrillation, arrhythmia, valvular disease and/or congestive heart failure or any other trait. The method comprises administering to the subject a therapeutically effective amount or a prophylactically effective amount of the RNAi agent, conjugate or composition of the present disclosure. In some embodiments, the method comprises administering a therapeutic amount of PCSK9 siRNA to a patient having a heterozygous LDLR genotype.

[0220] The RNAi agents of the present disclosure can be administered to a subject through any mode of administration known in the art, including, but not limited to, subcutaneous, intravenous, intramuscular, intraocular, intrabronchial, intrapleural, intraperitoneal, intraarterial, lymphatic, cerebrospinal administration, and any combination thereof. In a preferred embodiment, the agents are administered subcutaneously.

[0221] In some other embodiments, the siRNA is administered in combination with an additional therapeutic agent. The siRNA and the additional therapeutic agent can be administered in combination in the same composition, e.g., parenterally, or the additional therapeutic agent can be administered as part of a separate composition or by another method described herein.

[0222] Examples of additional therapeutic agents include drugs known to treat lipid disorders such as hypercholesterolemia, atherosclerosis, dyslipidemia or cardiovascular and cerebrovascular diseases. For example, additional therapeutic agents for treating hyperlipidemia are selected from fibrates, statins, bile acid sequestering agents and nicotinic acids. Additional therapeutic agents for treating cardiovascular and cerebrovascular diseases are selected from angiotensin converting enzyme inhibitors (e.g., captopril, enalapril, benazepril, or perindopril), angiotensin II receptor antagonists (e.g., losartan, losartan hydrochlorothiazide, valsartan, valsartan hydrochlorothiazide, telmisartan, telmisartan hydrochlorothiazide, or olmesartan medoxomil), and beta-blockers (e.g., propranolol, bisoprolol, metoprolol tartrate, or metoprolol succinate).

[0223] In some embodiments, the RNAi agent is administered to a patient and subsequently an additional therapeutic agent is administered to the patient (or vice versa). In some other embodiments, the RNAi agent and the additional therapeutic agent are administered simultaneously.

[0224] In another aspect, the present disclosure provides use of the aforementioned double-stranded RNAi agent, conjugate or composition in the manufacture of a medicament for treating a PCSK9-related disease.

[0225] In another aspect, the present disclosure provides use of the aforementioned double-stranded RNAi agent, conjugate or composition in the manufacture of a medicament for treating hypercholesterolemia, atherosclerosis, dyslipidemia or cardiovascular and cerebrovascular diseases.

[0226] In some embodiments, the PCSK9-related disease is selected from the group consisting of hypercholesterolemia, atherosclerosis, dyslipidemia, and cardiovascular and cerebrovascular diseases

[0227] The following examples are used to illustrate the present disclosure, but are not intended to limit the scope of the present disclosure. Unless otherwise specified, the technical means used in the examples are conventional means well known to those skilled in the art, and the raw materials used are all commercially available products.

[0228] The nucleotide abbreviations herein are as follows:
[0229] A=Adenosine-3′-phosphate
[0230] Am=2′-O-methoxyadenosine-3′-phosphate
[0231] Ams=2′-O-methoxyadenosine-3′-phosphorothioate
[0232] Af=2′-fluoroadenosine-3′-phosphate
[0233] Afs=2′-fluoroadenosine-3′-phosphorothioate
[0234] G=Guanosine-3′-phosphate
[0235] Gm=2′-O-methoxyguanosine-3′-phosphate
[0236] Gms=2′-O-methoxyguanosine-3′-phosphorothioate
[0237] Gf=2′-fluoroguanosine-3′-phosphate
[0238] Gfs=2′-fluoroguanosine-3′-phosphorothioate
[0239] C=Cytidine-3′-phosphate
[0240] Cm=2′-O-methoxycytidine-3′-phosphate
[0241] Cms=2′-O-methoxycytidine-3′-phosphorothioate
[0242] Cf=2′-fluorocytidine-3′-phosphate
[0243] Cfs=2′-fluorocytidine-3′-phosphorothioate
[0244] U=Uridine-3′-phosphate
[0245] Um=2′-O-methoxyuridine-3′-phosphate
[0246] Ums=2′-O-methoxyuridine-3′-phosphorothioate
[0247] Uf=2′-fluorouridine-3′-phosphate
[0248] Ufs=2′-fluorouridine-3′-phosphorothioate
[0249] AmsEVP=5′-vinyl-(E)-phosphonate-2′-methoxyadenosine-3′-phosphorothioate
[0250] UmsEVP=5′-vinyl-(E)-phosphonate-2′-methoxyuridine-3′-phosphorothioate
[0251] Agna=adenosine-diol nucleic acid
[0252] Cgna=cytidine-diol nucleic acid
[0253] Ggna=guanosine-diol nucleic acid
[0254] Tgna=thymidine-diol nucleic acid
[0255] Ugna=uridine-diol nucleic acid

### EXAMPLES

### Example 1: Synthesis of Alternately Modified Small Interfering Oligonucleotides

[0256] 84 siRNA basic sequences were designed based on the PCSK9 mRNA sequence. To improve the inhibition efficiency and stability of the sequence, the basic sequence was modified with 2′-methoxy (2′-OMe) and 2′-fluoro (2′-F) alternately, and the terminal was thio-modified. The nucleotides in the sense strand were modified with 2′-F in odd-numbered positions and with 2′-OMe in even-numbered positions, and the nucleotides in the antisense strand were modified with 2′-OMe in odd-numbered positions and with 2′-F in even-numbered positions. In addition, there were two thio-modifications at the 5′-end of the sense strand, and two thio-modifications at each of the 5′- and 3′-ends of the antisense strand. The alternately modified siRNA sequences are shown in Table 2.

### 1. Synthesis of the Alternately Modified Sequence P92-si5

[0257] The basic sequence of the small interfering RNA with sequence number P92-si5 in Table 2 is:

```
Sense strand:
  (SEQ ID NO: 1)
5′-AAGAUCCUGCAUGUCUUCCAU-3′
Antisense strand:
  (SEQ ID NO: 13)
5′-AUGGAAGACAUGCAGGAUCUUGG-3′
```

[0258] The nucleotides in odd-numbered positions in the sense strand and the nucleotides in even-numbered positions in the antisense strand were modified with 2′-F, and the nucleotides in other positions were modified with 2′-OMe. In addition, there were two thio-modifications at the 5′-end of the sense strand, and two thio-modifications at the 5′- and 3′-ends of the antisense strand.

[0259] Instruments and reagents: Tsingke's DNA/RNA automatic synthesizer, model 192 P, and the solid phase carrier was a universal carrier of cross-linked polystyrene beads, model Primer support 5G Unylinker 350 (cytiva manufacturer).

### Preparation Method:

[0260] According to the monomer concentration of 0.15 M, the following nucleotide monomer solutions were prepared with acetonitrile: DMT-A-OMe phosphoramidite monomer (Formula 1), DMT-C-OMe phosphoramidite monomer (Formula 2), DMT-G-OMe phosphoramidite monomer (Formula 3), DMT-U-OMe phosphoramidite monomer (Formula 4), DMT-A-F phosphoramidite monomer (Formula 5), DMT-C-F phosphoramidite monomer (Formula 6), DMT-G-F phosphoramidite monomer (Formula 7) and DMT-U-F phosphoramidite monomer (Formula 8).

[chemical structure]

[0261] The following steps were performed for the preparation:

### (1) Deprotection

[0262] The DMT protecting group was removed with a 3% dichloroacetic acid toluene solution as a deprotection agent, followed by washing with acetonitrile.

### (2) Conjugation

[0263] Each nucleotide monomer was conjugated in acetonitrile using 0.25 M 5-ethylthiotetrazolyl as an activating agent, followed by rinsing with acetonitrile.

### (3) Oxidation/Sulfurization

[0264] Oxidation: Oxidation was performed using 0.05 M iodine in pyridine/water (90/10) solution as an oxidant, followed by rinsing with acetonitrile.

[0265] Sulfurization: Sulfurization was performed using 3% hydrogenated xanthan gum in pyridine as a sulfurizing agent, followed by rinsing with acetonitrile.

### (4) Hydroxyl Protection

[0266] Hydroxyl protection was performed using 10% acetic anhydride tetrahydrofuran solution (CAP A) and tetrahydrofuran/pyridine/nitromethylimidazole 74/10/16 (v/v/v) (CAP B) as hydroxyl protecting reagents, followed by rinsing with acetonitrile.

[0267] The above steps were repeated and cycled according to the set sequence to obtain a fully protected product.

[0268] (5) The DMT protecting group of the last nucleotide was removed using 3% dichloroacetic acid toluene solution as a deprotection reagent, followed by rinsing with acetonitrile.

### (6) Aminolysis and Purification

[0269] The solid phase carrier was transferred to a reactor, and concentrated ammonia water (25-28%) was added. After the aminolysis was maintained at 60° C. for 12 h, the system was cooled to room temperature. The mixture was then transferred to a filter press and eluted with a mixed solution of purified water and ethanol. The filtrate was combined, passed through a chromatography column, concentrated, and freeze-dried to obtain the product.

### (7) Annealing

[0270] The purified sense strand and antisense strand were mixed in a 1:1 ratio, heated to 95° C. and maintained for 3 min, and then slowly cooled to room temperature to form a double strand.

[0271] P92-si5 purity 97.4%; measured molecular weight: 14493.52

### 2. Synthesis of Other Sequences

[0272] The other sequences listed in Table 2 were synthesized according to the above method.

TABLE 2
Alternately modified small interfering RNA sequences

| | | SEQ ID | | SEQ ID |
|---|---|---|---|---|
| | | NO:/ | | NO:/ |
| | | Corres- | | Corres- |
| | | ponding | | ponding |
| | | basic | | basic |
| | | sequence | | sequence |
| Sequence | | SEQ | | SEQ |
| No. | Sense strand sequence 5′-3′ | ID NO: | Antisense strand sequence 5′-3′ | ID NO: |
| P92-si5 | Afs-Ams-Gf-Am-Uf-Cm-Cf-Um-G | 169/1 | Ams-Ufs-Gm-Gf-Am-Af-Gm-Af-C | 181/13 |
| | f-Cm-Af-Um-Gf-Um-Cf-Um-Uf-C | | m-Af-Um-Gf-Cm-Af-Gm-Gf-Am- | |
| | m-Cf-Am-Uf | | Uf-Cm-Uf-Ums-Gfs-Gm | |
| P92-si51 | Ufs-Gms-Gf-Am-Gf-Gm-Cf-Um-U | 170/2 | Ams-Ufs-Cm-Cf-Am-Gf-Am-Af-A | 182/14 |
| | f-Am-Gf-Cm-Uf-Um-Uf-Cm-Uf-G | | m-Gf-Cm-Uf-Am-Af-Gm-Cf-Cm- | |
| | m-Gf-Am-Uf | | Uf-Cm-Cf-Ams-Ufs-Um | |
| P92-si81 | Cfs-Ums-Uf-Um-Uf-Gm-Uf-Am-A | 171/3 | Ams-Afs-Um-Af-Um-Cf-Um-Uf-C | 183/15 |
| | f-Cm-Uf-Um-Gf-Am-Af-Gm-Af-U | | m-Af-Am-Gf-Um-Uf-Am-Cf-Am- | |
| | m-Af-Um-Uf | | Af-Am-Af-Gms-Cfs-Am | |
| P92-si82 | Gfs-Ams-Af-Gm-Af-Um-Af-Um-U | 172/4 | Ams-Afs-Am-Cf-Cm-Cf-Am-Gf-A | 184/16 |
| | f-Um-Af-Um-Uf-Cm-Uf-Gm-Gf-G | | m-Af-Um-Af-Am-Af-Um-Af-Um- | |
| | m-Uf-Um-Uf | | Cf-Um-Uf-Cms-Afs-Am | |
| P92-si84 | Gfs-Ums-Uf-Um-Uf-Gm-Uf-Am-G | 173/5 | Ums-Ufs-Am-Af-Um-Af-Am-Af-A | 185/17 |
| | f-Cm-Af-Um-Uf-Um-Uf-Um-Af-U | | m-Af-Um-Gf-Cm-Uf-Am-Cf-Am- | |
| | m-Uf-Am-Af | | Af-Am-Af-Cms-Cfs-Cm | |
| P92-si3 | Cfs-Ams-Cf-Cm-Af-Am-Gf-Am-Uf- | 174/6 | Ams-Afs-Gm-Af-Cm-Af-Um-Gf-C | 186/18 |
| | Cm-Cf-Um-Gf-Cm-Af-Um-Gf-Um- | | m-Af-Gm-Gf-Am-Uf-Cm-Uf-Um- | |
| | Cf-Um-Uf | | Gf-Gm-Uf-Gms-Afs-Gm | |
| P92-si8 | Cfs-Ums-Cf-Am-Uf-Am-Gf-Gm-Cf- | 175/7 | Ams-Afs-Um-Af-Am-Af-Cm-Uf-C | 187/19 |
| | Cm-Uf-Gm-Gf-Am-Gf-Um-Uf-U | | m-Cf-Am-Gf-Gm-Cf-Cm-Uf-Am- | |
| | m-Af-Um-Uf | | Uf-Gm-Af-Gms-Gfs-Gm | |
| P92-si9 | Gfs-Gms-Cf-Cm-Uf-Gm-Gf-Am-G | 176/8 | Ums-Ufs-Um-Cf-Cm-Gf-Am-Af-U | 188/20 |
| | f-Um-Uf-Um-Af-Um-Uf-Cm-Gf-G | | m-Af-Am-Af-Cm-Uf-Cm-Cf-Am- | |
| | m-Af-Am-Af | | Gf-Gm-Cf-Cms-Ufs-Am | |
| P92-si21 | Cfs-Ams-Gf-Cm-Af-Cm-Cf-Um-Gf- | 177/9 | Ums-Gfs-Um-Gf-Am-Cf-Am-Cf-A | 189/21 |
| | Cm-Uf-Um-Uf-Gm-Uf-Gm-Uf-C | | m-Af-Am-Gf-Cm-Af-Gm-Gf-Um- | |
| | m-Af-Cm-Af | | Gf-Cm-Uf-Gms-Cfs-Am | |
| P92-si31 | Gfs-Gms-Uf-Cm-Uf-Gm-Gf-Am-A | 178/10 | Cms-Ufs-Um-Gf-Am-Cf-Um-Uf-U | 190/22 |
| | f-Um-Gf-Cm-Af-Am-Af-Gm-Uf-C | | m-Gf-Cm-Af-Um-Uf-Cm-Cf-Am- | |
| | m-Af-Am-Gf | | Gf-Am-Cf-Cms-Ufs-Gm | |
| P92-si73 | Gfs-Cms-Gf-Gm-Af-Gm-Af-Um-G | 179/11 | Ams-Ufs-Gm-Cf-Cm-Uf-Um-Af-G | 191/23 |
| | f-Cm-Uf-Um-Cf-Um-Af-Am-Gf-G | | m-Af-Am-Gf-Cm-Af-Um-Cf-Um- | |
| | m-Cf-Am-Uf | | Cf-Cm-Gf-Cms-Cfs-Am | |
| P92-si83 | Gfs-Gms-Gf-Um-Uf-Um-Uf-Gm-U | 180/12 | Ams-Afs-Um-Af-Am-Af-Am-Af-U | 192/24 |
| | f-Am-Gf-Cm-Af-Um-Uf-Um-Uf-U | | m-Gf-Cm-Uf-Am-Cf-Am-Af-Am- | |
| | m-Af-Um-Uf | | Af-Cm-Cf-Cms-Afs-Gm | |
| P92-si1 | Gfs-Gms-Gf-Am-Uf-Am-Cf-Cm-U | 193/25 | Ams-Gfs-Gm-Af-Um-Cf-Um-Uf-G | 265/97 |
| | f-Cm-Af-Cm-Cf-Am-Af-Gm-Af-U | | m-Gf-Um-Gf-Am-Gf-Gm-Uf-Am- | |
| | m-Cf-Cm-Uf | | Uf-Cm-Cf-Cms-Cfs-Gm | |
| P92-si2 | Afs-Ums-Af-Cm-Cf-Um-Cf-Am-Cf- | 194/26 | Ums-Gfs-Cm-Af-Gm-Gf-Am-Uf-C | 266/98 |
| | Cm-Af-Am-Gf-Am-Uf-Cm-Cf-Um- | | m-Uf-Um-Gf-Gm-Uf-Gm-Af-Gm- | |
| | Gf-Cm-Af | | Gf-Um-Af-Ums-Cfs-Cm | |
| P92-si4 | Cfs-Ams-Af-Gm-Af-Um-Cf-Cm-Uf- | 195/27 | Ums-Gfs-Gm-Af-Am-Gf-Am-Cf-A | 267/99 |
| | Gm-Cf-Am-Uf-Gm-Uf-Cm-Uf-U | | m-Uf-Gm-Cf-Am-Gf-Gm-Af-Um- | |
| | m-Cf-Cm-Af | | Cf-Um-Uf-Gms-Gfs-Um | |
| P92-si6 | Gfs-Gms-Cf-Um-Uf-Cm-Cf-Um-Gf- | 196/28 | Ams-Cfs-Um-Cf-Am-Uf-Cm-Uf-U | 268/10 |
| | Gm-Uf-Gm-Af-Am-Gf-Am-Uf-G | | m-Cf-Am-Cf-Cm-Af-Gm-Gf-Am- | 0 |
| | m-Af-Gm-Uf | | Af-Gm-Cf-Cms-Afs-Gm | |
| P92-si7 | Gfs-Cms-Uf-Gm-Gf-Am-Gf-Cm-U | 197/29 | Ams-Afs-Cm-Uf-Um-Cf-Am-Af-G | 269/10 |
| | f-Gm-Gf-Cm-Cf-Um-Uf-Gm-Af-A | | m-Gf-Cm-Cf-Am-Gf-Cm-Uf-Cm-C | 1 |
| | m-Gf-Um-Uf | | f-Am-Gf-Cms-Afs-Gm | |
| P92-si10 | Cfs-Cms-Uf-Gm-Gf-Am-Gf-Um-U | 198/30 | Cms-Ufs-Um-Uf-Um-Cf-Cm-Gf-A | 270/10 |
| | f-Um-Af-Um-Uf-Cm-Gf-Gm-Af-A | | m-Af-Um-Af-Am-Af-Cm-Uf-Cm- | 2 |
| | m-Af-Am-Gf | | Cf-Am-Gf-Gms-Cfs-Cm | |
| P92-si11 | Gfs-Cms-Cf-Am-Gf-Cm-Uf-Gm-Gf- | 199/31 | Cms-Cfs-Am-Cf-Am-Gf-Gm-Cf-U | 271/10 |
| | Um-Cf-Cm-Af-Gm-Cf-Cm-Uf-Gm- | | m-Gf-Gm-Af-Cm-Cf-Am-Gf-Cm- | 3 |
| | Uf-Gm-Gf | | Uf-Gm-Gf-Cms-Ufs-Um | |
| P92-si12 | Afs-Cms-Uf-Gm-Gf-Um-Gf-Gm-U | 200/32 | Ams-Gfs-Gm-Gf-Gm-Cf-Am-Gf-C | 272/10 |
| | f-Gm-Cf-Um-Gf-Cm-Uf-Gm-Cf-C | | m-Af-Gm-Cf-Am-Cf-Cm-Af-Cm-C | 4 |
| | m-Cf-Cm-Uf | | f-Am-Gf-Ums-Gfs-Gm | |
| P92-si13 | Ufs-Gms-Cf-Cm-Cf-Cm-Uf-Gm-Gf- | 201/33 | Ums-Gfs-Um-Af-Cm-Cf-Cm-Af-C | 273/10 |
| | Cm-Gf-Gm-Gf-Um-Gf-Gm-Gf-U | | m-Cf-Cm-Gf-Cm-Cf-Am-Gf-Gm-G | 5 |
| | m-Af-Cm-Af | | f-Gm-Cf-Ams-Gfs-Cm | |
| P92-si14 | Ufs-Gms-Gf-Gm-Uf-Am-Cf-Am-G | 202/34 | Ums-Ufs-Gm-Af-Gm-Gf-Am-Cf-G | 274/10 |
| | f-Cm-Cf-Gm-Cf-Gm-Uf-Cm-Cf-U | | m-Cf-Gm-Gf-Cm-Uf-Gm-Uf-Am- | 6 |
| | m-Cf-Am-Af | | Cf-Cm-Cf-Ams-Cfs-Cm | |
| P92-si15 | Cfs-Gms-Uf-Cm-Cf-Um-Cf-Am-Af- | 203/35 | Ums-Gfs-Gm-Cf-Am-Gf-Gm-Cf-G | 275/10 |
| | Cm-Gf-Cm-Cf-Gm-Cf-Cm-Uf-Gm- | | m-Gf-Cm-Gf-Um-Uf-Gm-Af-Gm- | 7 |
| | Cf-Cm-Af | | Gf-Am-Cf-Gms-Cfs-Gm | |
| P92-si16 | Gfs-Gms-Uf-Cm-Gf-Um-Gf-Cm-U | 204/36 | Gms-Cfs-Am-Gf-Cm-Gf-Gm-Uf-G | 276/10 |
| | f-Gm-Gf-Um-Cf-Am-Cf-Cm-Gf-C | | m-Af-Cm-Cf-Am-Gf-Cm-Af-Cm-G | 8 |
| | m-Uf-Gm-Cf | | f-Am-Cf-Cms-Cfs-Cm | |
| P92-si17 | Afs-Gms-Gf-Am-Cf-Am-Uf-Cm-A | 205/37 | Ums-Gfs-Gm-Af-Gm-Gf-Cm-Af-C | 277/10 |
| | f-Um-Uf-Gm-Gf-Um-Gf-Cm-Cf-U | | m-Cf-Am-Af-Um-Gf-Am-Uf-Gm- | 9 |
| | m-Cf-Cm-Af | | Uf-Cm-Cf-Ums-Cfs-Cm | |
| P92-si18 | Ufs-Cms-Af-Um-Uf-Gm-Gf-Um-G | 206/38 | Ams-Gfs-Um-Cf-Gm-Cf-Um-Gf-G | 278/11 |
| | f-Cm-Cf-Um-Cf-Cm-Af-Gm-Cf-G | | m-Af-Gm-Gf-Cm-Af-Cm-Cf-Am- | 0 |
| | m-Af-Cm-Uf | | Af-Um-Gf-Ams-Ufs-Gm | |
| P92-si19 | Gfs-Ums-Gf-Cm-Cf-Um-Cf-Cm-Af- | 207/39 | Ums-Gfs-Cm-Uf-Gm-Cf-Am-Gf-U | 279/11 |
| | Gm-Cf-Gm-Af-Cm-Uf-Gm-Cf-Am- | | m-Cf-Gm-Cf-Um-Gf-Gm-Af-Gm- | 1 |
| | Gf-Cm-Af | | Gf-Cm-Af-Cms-Cfs-Am | |
| P92-si20 | Afs-Gms-Cf-Gm-Af-Cm-Uf-Gm-Cf- | 208/40 | Ams-Afs-Am-Gf-Cm-Af-Gm-Gf-U | 280/11 |
| | Am-Gf-Cm-Af-Cm-Cf-Um-Gf-Cm- | | m-Gf-Cm-Uf-Gm-Cf-Am-Gf-Um- | 2 |
| | Uf-Um-Uf | | Cf-Gm-Cf-Ums-Gfs-Gm | |
| P92-si22 | Gfs-Cms-Af-Cm-Cf-Um-Gf-Cm-Uf- | 209/41 | Ums-Cfs-Um-Gf-Um-Gf-Am-Cf-A | 281/11 |
| | Um-Uf-Gm-Uf-Gm-Uf-Cm-Af-C | | m-Cf-Am-Af-Am-Gf-Cm-Af-Gm- | 3 |
| | m-Af-Gm-Af | | Gf-Um-Gf-Cms-Ufs-Gm | |
| P92-si23 | Cfs-Ums-Uf-Um-Gf-Um-Gf-Um-C | 210/42 | Gms-Ufs-Cm-Cf-Cm-Af-Cm-Uf-C | 282/11 |
| | f-Am-Cf-Am-Gf-Am-Gf-Um-Gf-G | | m-Uf-Gm-Uf-Gm-Af-Cm-Af-Cm- | 4 |
| | m-Gf-Am-Cf | | Af-Am-Af-Gms-Cfs-Am | |
| P92-si24 | Afs-Gms-Uf-Gm-Gf-Gm-Af-Cm-A | 211/43 | Ams-Gfs-Cm-Af-Gm-Cf-Cm-Uf-G | 283/11 |
| | f-Um-Cf-Am-Cf-Am-Gf-Gm-Cf-U | | m-Uf-Gm-Af-Um-Gf-Um-Cf-Cm- | 5 |
| | m-Gf-Cm-Uf | | Cf-Am-Cf-Ums-Cfs-Um | |
| P92-si25 | Afs-Ums-Cf-Am-Cf-Am-Gf-Gm-Cf- | 212/44 | Ams-Cfs-Gm-Uf-Gm-Gf-Gm-Cf-A | 284/11 |
| | Um-Gf-Cm-Uf-Gm-Cf-Cm-Cf-Am- | | m-Gf-Cm-Af-Gm-Cf-Cm-Uf-Gm- | 6 |
| | Cf-Gm-Uf | | Uf-Gm-Af-Ums-Gfs-Um | |
| P92-si26 | Ufs-Gms-Uf-Cm-Uf-Gm-Cf-Cm-Gf- | 213/45 | Ums-Gfs-Am-Gf-Cm-Uf-Cm-Cf-G | 285/11 |
| | Am-Gf-Cm-Cf-Gm-Gf-Am-Gf-Cm- | | m-Gf-Cm-Uf-Cm-Gf-Gm-Cf-Am- | 7 |
| | Uf-Cm-Af | | Gf-Am-Cf-Ams-Gfs-Cm | |
| P92-si27 | Gfs-Gms-Cf-Cm-Gf-Am-Gf-Um-U | 214/46 | Ams-Gfs-Um-Cf-Um-Cf-Um-Gf-C | 286/11 |
| | f-Gm-Af-Gm-Gf-Cm-Af-Gm-Af-G | | m-Cf-Um-Cf-Am-Af-Cm-Uf-Cm-G | 8 |
| | m-Af-Cm-Uf | | f-Gm-Cf-Cms-Afs-Gm | |
| P92-si28 | Cfs-Ams-Uf-Cm-Cf-Am-Cf-Gm-Cf- | 215/47 | Ums-Gfs-Gm-Cf-Am-Gf-Cm-Af-G | 287/11 |
| | Um-Uf-Cm-Cf-Um-Gf-Cm-Uf-Gm- | | m-Gf-Am-Af-Gm-Cf-Gm-Uf-Gm- | 9 |
| | Cf-Cm-Af | | Gf-Am-Uf-Gms-Cfs-Um | |
| P92-si29 | Cfs-Cms-Cf-Am-Gf-Gm-Uf-Cm-Uf- | 216/48 | Ams-Cfs-Um-Uf-Um-Gf-Cm-Af-U | 288/12 |
| | Gm-Gf-Am-Af-Um-Gf-Cm-Af-A | | m-Uf-Cm-Cf-Am-Gf-Am-Cf-Cm-U | 0 |
| | m-Af-Gm-Uf | | f-Gm-Gf-Gms-Gfs-Cm | |
| P92-si30 | Afs-Gms-Gf-Um-Cf-Um-Gf-Gm-A | 217/49 | Ums-Ufs-Gm-Af-Cm-Uf-Um-Uf-G | 289/12 |
| | f-Am-Uf-Gm-Cf-Am-Af-Am-Gf-U | | m-Cf-Am-Uf-Um-Cf-Cm-Af-Gm- | 1 |
| | m-Cf-Am-Af | | Af-Cm-Cf-Ums-Gfs-Gm | |
| P92-si32 | Gfs-Ams-Af-Um-Gf-Cm-Af-Am-A | 218/50 | Ams-Ufs-Gm-Cf-Um-Cf-Cm-Uf-U | 290/12 |
| | f-Gm-Uf-Cm-Af-Am-Gf-Gm-Af-G | | m-Gf-Am-Cf-Um-Uf-Um-Gf-Cm- | 2 |
| | m-Cf-Am-Uf | | Af-Um-Uf-Cms-Cfs-Am | |
| P92-si33 | Cfs-Ams-Af-Am-Gf-Um-Cf-Am-A | 219/51 | Ams-Ufs-Um-Cf-Cm-Af-Um-Gf-C | 291/12 |
| | f-Gm-Gf-Am-Gf-Cm-Af-Um-Gf-G | | m-Uf-Cm-Cf-Um-Uf-Gm-Af-Cm- | 3 |
| | m-Af-Am-Uf | | Uf-Um-Uf-Gms-Cfs-Am | |
| P92-si34 | Cfs-Cms-Cf-Um-Cf-Am-Gf-Gm-Af- | 220/52 | Ams-Cfs-Gm-Gf-Um-Cf-Am-Cf-C | 292/12 |
| | Gm-Cf-Am-Gf-Gm-Uf-Gm-Af-C | | m-Uf-Gm-Cf-Um-Cf-Cm-Uf-Gm- | 4 |
| | m-Cf-Gm-Uf | | Af-Gm-Gf-Gms-Gfs-Cm | |
| P92-si35 | Gfs-Ams-Gf-Gm-Af-Gm-Gf-Gm-C | 221/53 | Ams-Gfs-Um-Cf-Am-Gf-Gm-Gf-U | 293/12 |
| | f-Um-Gf-Gm-Af-Cm-Cf-Cm-Uf-G | | m-Cf-Cm-Af-Gm-Cf-Cm-Cf-Um-C | 5 |
| | m-Af-Cm-Uf | | f-Cm-Uf-Cms-Gfs-Cm | |
| P92-si36 | Gfs-Cms-Uf-Gm-Cf-Am-Gf-Um-G | 222/54 | Ums-Cfs-Cm-Cf-Am-Gf-Gm-Gf-A | 294/12 |
| | f-Cm-Cf-Cm-Uf-Cm-Cf-Cm-Uf-G | | m-Gf-Gm-Gf-Cm-Af-Cm-Uf-Gm- | 6 |
| | m-Gf-Gm-Af | | Cf-Am-Gf-Cms-Cfs-Am | |
| P92-si37 | Cfs-Cms-Uf-Cm-Cf-Cm-Uf-Gm-Gf- | 223/55 | Ams-Cfs-Gm-Uf-Gm-Gf-Gm-Af-G | 295/12 |
| | Gm-Af-Cm-Cf-Um-Cf-Cm-Cf-Am- | | m-Gf-Um-Cf-Cm-Cf-Am-Gf-Gm- | 7 |
| | Cf-Gm-Uf | | Gf-Am-Gf-Gms-Gfs-Cm | |
| P92-si38 | Cfs-Cms-Cf-Um-Gf-Gm-Gf-Am-Cf- | 224/56 | Ams-Gfs-Gm-Af-Cm-Gf-Um-Gf-G | 296/12 |
| | Cm-Uf-Cm-Cf-Cm-Af-Cm-Gf-Um | | m-Gf-Am-Gf-Gm-Uf-Cm-Cf-Cm- | 8 |
| | Cf-Cm-Uf | | Af-Gm-Gf-Gms-Afs-Gm | |
| P92-si39 | Gfs-Gms-Gf-Cm-Cf-Um-Af-Cm-Gf- | 225/57 | Ums-Gfs-Um-Uf-Gm-Uf-Cm-Uf-A | 297/12 |
| | Cm-Cf-Gm-Uf-Am-Gf-Am-Cf-Am- | | m-Cf-Gm-Gf-Cm-Gf-Um-Af-Gm- | 9 |
| | Af-Cm-Af | | Gf-Cm-Cf-Cms-Cfs-Cm | |
| P92-si40 | Gfs-Cms-Cf-Gm-Uf-Am-Gf-Am-Cf- | 226/58 | Ums-Afs-Cm-Af-Cm-Af-Cm-Gf-U | 298/13 |
| | Am-Af-Cm-Af-Cm-Gf-Um-Gf-U | | m-Gf-Um-Uf-Gm-Uf-Cm-Uf-Am- | 0 |
| | m-Gf-Um-Af | | Cf-Gm-Gf-Cms-Gfs-Um | |
| P92-si41 | Cfs-Cms-Gf-Um-Af-Gm-Af-Cm-Af- | 227/59 | Cms-Ufs-Am-Cf-Am-Cf-Am-Cf-G | 299/13 |
| | Am-Cf-Am-Cf-Gm-Uf-Gm-Uf-G | | m-Uf-Gm-Uf-Um-Gf-Um-Cf-Um- | 1 |
| | m-Uf-Am-Gf | | Af-Cm-Gf-Gms-Cfs-Gm | |
| P92-si42 | Ufs-Ams-Gf-Am-Cf-Am-Af-Cm-A | 228/60 | Ums-Gfs-Am-Cf-Um-Af-Cm-Af-C | 300/13 |
| | f-Cm-Gf-Um-Gf-Um-Gf-Um-Af-G | | m-Af-Cm-Gf-Um-Gf-Um-Uf-Gm- | 2 |
| | m-Uf-Cm-Af | | Uf-Cm-Uf-Ams-Cfs-Gm | |
| P92-si43 | Gfs-Ums-Gf-Um-Gf-Um-Af-Gm-U | 229/61 | Ums-Cfs-Cm-Cf-Gm-Gf-Cm-Uf-C | 301/13 |
| | f-Cm-Af-Gm-Gf-Am-Gf-Cm-Cf-G | | m-Cf-Um-Gf-Am-Cf-Um-Af-Cm- | 3 |
| | m-Gf-Gm-Af | | Af-Cm-Af-Cms-Gfs-Um | |
| P92-si44 | Gfs-Ams-Gf-Cm-Cf-Gm-Gf-Gm-A | 230/62 | Gms-Ufs-Am-Gf-Um-Gf-Cm-Uf-G | 302/13 |
| | f-Cm-Gf-Um-Cf-Am-Gf-Cm-Af-C | | m-Af-Cm-Gf-Um-Cf-Cm-Cf-Gm-G | 4 |
| | m-Uf-Am-Cf | | f-Cm-Uf-Cms-Cfs-Um | |
| P92-si45 | Ufs-Cms-Af-Gm-Cf-Am-Cf-Um-Af- | 231/63 | Ums-Gfs-Gm-Uf-Gm-Cf-Um-Gf-C | 303/13 |
| | Cm-Af-Gm-Gf-Cm-Af-Gm-Cf-Am- | | m-Cf-Um-Gf-Um-Af-Gm-Uf-Gm- | 5 |
| | Cf-Cm-Af | | Cf-Um-Gf-Ams-Cfs-Gm | |
| P92-si46 | Ufs-Cms-Uf-Cm-Cf-Am-Gf-Cm-Uf- | 232/64 | Ums-Ufs-Cm-Uf-Cm-Cf-Am-Cf-A | 304/13 |
| | Am-Af-Cm-Uf-Gm-Uf-Gm-Gf-A | | m-Gf-Um-Uf-Am-Gf-Cm-Uf-Gm- | 6 |
| | m-Gf-Am-Af | | Gf-Am-Gf-Ams-Ufs-Gm | |
| P92-si47 | Gfs-Cms-Uf-Cm-Cf-Cm-Uf-Gm-Af- | 233/65 | Ams-Gfs-Cm-Cf-Um-Cf-Cm-Af-U | 305/13 |
| | Um-Uf-Am-Af-Um-Gf-Gm-Af-G | | m-Uf-Am-Af-Um-Cf-Am-Gf-Gm- | 7 |
| | m-Gf-Cm-Uf | | Gf-Am-Gf-Cms-Cfs-Cm | |
| P92-si48 | Ufs-Cms-Cf-Cm-Uf-Gm-Af-Um-Uf- | 234/66 | Ums-Afs-Am-Gf-Cm-Cf-Um-Cf-C | 306/13 |
| | Am-Af-Um-Gf-Gm-Af-Gm-Gf-C | | m-Af-Um-Uf-Am-Af-Um-Cf-Am- | 8 |
| | m-Uf-Um-Af | | Gf-Gm-Gf-Ams-Gfs-Cm | |
| P92-si49 | Cfs-Cms-Uf-Gm-Af-Um-Uf-Am-A | 235/67 | Gms-Cfs-Um-Af-Am-Gf-Cm-Cf-U | 307/13 |
| | f-Um-Gf-Gm-Af-Gm-Gf-Cm-Uf-U | | m-Cf-Cm-Af-Um-Uf-Am-Af-Um- | 9 |
| | m-Af-Gm-Cf | | Cf-Am-Gf-Gms-Gfs-Am | |
| P92-si50 | Gfs-Ams-Uf-Um-Af-Am-Uf-Gm-G | 236/68 | Ams-Afs-Am-Gf-Cm-Uf-Am-Af-G | 308/14 |
| | f-Am-Gf-Gm-Cf-Um-Uf-Am-Gf-C | | m-Cf-Cm-Uf-Cm-Cf-Am-Uf-Um-A | 0 |
| | m-Uf-Um-Uf | | f-Am-Uf-Cms-Afs-Gm | |
| P92-si52 | Gfs-Gms-Uf-Gm-Gf-Um-Cf-Am-C | 237/69 | Ams-Afs-Gm-Gf-Cm-Af-Cm-Af-G | 309/14 |
| | f-Am-Gf-Gm-Cf-Um-Gf-Um-Gf-C | | m-Cf-Cm-Uf-Gm-Uf-Gm-Af-Cm-C | 1 |
| | m-Cf-Um-Uf | | f-Am-Cf-Cms-Afs-Gm | |
| P92-si53 | Ufs-Cms-Af-Cm-Af-Gm-Gf-Cm-Uf- | 238/70 | Ams-Afs-Am-Cf-Cm-Af-Am-Gf-G | 310/14 |
| | Gm-Uf-Gm-Cf-Cm-Uf-Um-Gf-G | | m-Cf-Am-Cf-Am-Gf-Cm-Cf-Um-G | 2 |
| | m-Uf-Um-Uf | | f-Um-Gf-Ams-Cfs-Cm | |
| P92-si54 | Gfs-Ums-Gf-Cm-Cf-Um-Uf-Gm-G | 239/71 | Ums-Gfs-Gm-Cf-Um-Cf-Am-Gf-G | 311/14 |
| | f-Um-Uf-Um-Cf-Cm-Uf-Gm-Af-G | | m-Af-Am-Af-Cm-Cf-Am-Af-Gm- | 3 |
| | m-Cf-Cm-Af | | Gf-Cm-Af-Cms-Afs-Gm | |
| P92-si55 | Afs-Gms-Cf-Cm-Af-Cm-Cf-Um-Uf- | 240/72 | Ums-Afs-Gm-Af-Gm-Cf-Am-Gf-A | 312/14 |
| | Um-Af-Cm-Uf-Cm-Uf-Gm-Cf-Um- | | m-Gf-Um-Af-Am-Af-Gm-Gf-Um- | 4 |
| | Cf-Um-Af | | Gf-Gm-Cf-Ums-Cfs-Am | |
| P92-si56 | Cfs-Cms-Af-Cm-Cf-Um-Uf-Um-Af- | 241/73 | Cms-Afs-Um-Af-Gm-Af-Gm-Cf-A | 313/14 |
| | Cm-Uf-Cm-Uf-Gm-Cf-Um-Cf-Um- | | m-Gf-Am-Gf-Um-Af-Am-Af-Gm- | 5 |
| | Af-Um-Gf | | Gf-Um-Gf-Gms-Cfs-Um | |
| P92-si57 | Cfs-Ums-Uf-Um-Af-Cm-Uf-Cm-Uf- | 242/74 | Cms-Ufs-Gm-Gf-Cm-Af-Um-Af-G | 314/14 |
| | Gm-Cf-Um-Cf-Um-Af-Um-Gf-Cm- | | m-Af-Gm-Cf-Am-Gf-Am-Gf-Um- | 6 |
| | Cf-Am-Gf | | Af-Am-Af-Gms-Gfs-Um | |
| P92-si58 | Gfs-Cms-Uf-Gm-Uf-Gm-Cf-Um-A | 243/75 | Ums-Ufs-Um-Gf-Gm-Gf-Um-Gf-U | 315/14 |
| | f-Gm-Cf-Am-Af-Cm-Af-Cm-Cf-C | | m-Uf-Gm-Cf-Um-Af-Gm-Cf-Am- | 7 |
| | m-Af-Am-Af | | Cf-Am-Gf-Cms-Cfs-Um | |
| P92-si59 | Ufs-Cms-Af-Cm-Cf-Um-Af-Gm-Gf- | 244/76 | Ums-Gfs-Cm-Cf-Gm-Af-Gm-Uf-C | 316/14 |
| | Am-Cf-Um-Gf-Am-Cf-Um-Cf-Gm- | | m-Af-Gm-Uf-Cm-Cf-Um-Af-Gm- | 8 |
| | Gf-Cm-Af | | Gf-Um-Gf-Ams-Ufs-Gm | |
| P92-si60 | Afs-Cms-Uf-Gm-Af-Cm-Uf-Cm-Gf- | 245/77 | Ams-Cfs-Um-Gf-Cm-Af-Cm-Af-C | 317/14 |
| | Gm-Cf-Am-Gf-Um-Gf-Um-Gf-C | | m-Uf-Gm-Cf-Cm-Gf-Am-Gf-Um- | 9 |
| | m-Af-Gm-Uf | | Cf-Am-Gf-Ums-Cfs-Cm | |
| P92-si61 | Ufs-Cms-Gf-Gm-Cf-Am-Gf-Um-G | 246/78 | Ums-Gfs-Cm-Af-Cm-Cf-Am-Cf-U | 318/15 |
| | f-Um-Gf-Cm-Af-Gm-Uf-Gm-Gf-U | | m-Gf-Cm-Af-Cm-Af-Cm-Uf-Gm-C | 0 |
| | m-Gf-Cm-Af | | f-Cm-Gf-Ams-Gfs-Um | |
| P92-si62 | Gfs-Gms-Cf-Am-Gf-Um-Gf-Um-G | 247/79 | Cms-Afs-Um-Gf-Cm-Af-Cm-Cf-A | 319/15 |
| | f-Cm-Af-Gm-Uf-Gm-Gf-Um-Gf-C | | m-Cf-Um-Gf-Cm-Af-Cm-Af-Cm-U | 1 |
| | m-Af-Um-Gf | | f-Gm-Cf-Cms-Gfs-Am | |
| P92-si63 | Gfs-Cms-Af-Gm-Uf-Gm-Gf-Um-G | 248/80 | Ams-Gfs-Am-Cf-Am-Gf-Um-Gf-C | 320/15 |
| | f-Cm-Af-Um-Gf-Cm-Af-Cm-Uf-G | | m-Af-Um-Gf-Cm-Af-Cm-Cf-Am-C | 2 |
| | m-Uf-Cm-Uf | | f-Um-Gf-Cms-Afs-Cm | |
| P92-si64 | Gfs-Ums-Gf-Cm-Af-Um-Gf-Cm-A | 249/81 | Ums-Gfs-Gm-Cf-Um-Gf-Am-Gf-A | 321/15 |
| | f-Cm-Uf-Gm-Uf-Cm-Uf-Cm-Af-G | | m-Cf-Am-Gf-Um-Gf-Cm-Af-Um- | 3 |
| | m-Cf-Cm-Af | | Gf-Cm-Af-Cms-Cfs-Am | |
| P92-si65 | Afs-Ams-Cf-Cm-Cf-Gm-Cf-Um-Cf- | 250/82 | Ums-Gfs-Cm-Cf-Gm-Gf-Gm-Uf-A | 322/15 |
| | Cm-Af-Cm-Uf-Am-Cf-Cm-Cf-Gm- | | m-Gf-Um-Gf-Gm-Af-Gm-Cf-Gm- | 4 |
| | Gf-Cm-Af | | Gf-Gm-Uf-Ums-Gfs-Gm | |
| P92-si66 | Afs-Cms-Uf-Am-Cf-Cm-Cf-Gm-Gf- | 251/83 | Ams-Ufs-Gm-Uf-Gm-Uf-Am-Cf-C | 323/15 |
| | Cm-Af-Gm-Gf-Gm-Uf-Am-Cf-A | | m-Cf-Um-Gf-Cm-Cf-Gm-Gf-Gm- | 5 |
| | m-Cf-Am-Uf | | Uf-Am-Gf-Ums-Gfs-Gm | |
| P92-si67 | Cfs-Cms-Uf-Am-Cf-Um-Uf-Cm-Af- | 252/84 | Ums-Ufs-Um-Cf-Um-Uf-Cm-Cf-U | 324/15 |
| | Cm-Af-Gm-Af-Gm-Gf-Am-Af-G | | m-Cf-Um-Gf-Um-Gf-Am-Af-Gm- | 6 |
| | m-Af-Am-Af | | Uf-Am-Gf-Gms-Gfs-Gm | |
| P92-si68 | Cfs-Cms-Af-Gm-Gf-Am-Af-Gm-Cf- | 253/85 | Ams-Ufs-Cm-Af-Cm-Uf-Cm-Af-C | 325/15 |
| | Um-Cf-Gm-Gf-Um-Gf-Am-Gf-U | | m-Cf-Gm-Af-Gm-Cf-Um-Uf-Cm-C | 7 |
| | m-Gf-Am-Uf | | f-Um-Gf-Gms-Ufs-Cm | |
| P92-si69 | Afs-Gms-Af-Am-Cf-Gm-Af-Um-G | 254/86 | Cms-Afs-Um-Gf-Cm-Cf-Um-Gf-C | 326/15 |
| | f-Cm-Cf-Um-Gf-Cm-Af-Gm-Gf-C | | m-Af-Gm-Gf-Cm-Af-Um-Cf-Gm- | 8 |
| | m-Af-Um-Gf | | Uf-Um-Cf-Ums-Gfs-Cm | |
| P92-si70 | Ufs-Gms-Cf-Cm-Uf-Gm-Cf-Am-Gf- | 255/87 | Ams-Afs-Am-Gf-Um-Uf-Cm-Cf-A | 327/15 |
| | Gm-Cf-Am-Uf-Gm-Gf-Am-Af-C | | m-Uf-Gm-Cf-Cm-Uf-Gm-Cf-Am- | 9 |
| | m-Uf-Um-Uf | | Gf-Gm-Cf-Ams-Ufs-Cm | |
| P92-si71 | Cfs-Gms-Uf-Um-Af-Um-Cf-Am-Cf- | 256/88 | Ams-Afs-Um-Cf-Am-Gf-Gm-Cf-C | 328/16 |
| | Cm-Cf-Am-Gf-Gm-Cf-Cm-Uf-Gm- | | m-Uf-Gm-Gf-Gm-Uf-Gm-Af-Um- | 0 |
| | Af-Um-Uf | | Af-Am-Cf-Gms-Gfs-Am | |
| P92-si72 | Cfs-Ams-Cf-Cm-Cf-Am-Gf-Gm-Cf- | 257/89 | Cms-Cfs-Am-Gf-Um-Gf-Am-Af-U | 329/16 |
| | Cm-Uf-Gm-Af-Um-Uf-Cm-Af-Cm- | | m-Cf-Am-Gf-Gm-Cf-Cm-Uf-Gm- | 1 |
| | Uf-Gm-Gf | | Gf-Gm-Uf-Gms-Afs-Um | |
| P92-si74 | Cfs-Gms-Gf-Am-Gf-Am-Uf-Gm-C | 258/90 | Cms-Afs-Um-Gf-Cm-Cf-Um-Uf-A | 330/16 |
| | f-Um-Uf-Cm-Uf-Am-Af-Gm-Gf-C | | m-Gf-Am-Af-Gm-Cf-Am-Uf-Cm- | 2 |
| | m-Af-Um-Gf | | Uf-Cm-Cf-Gms-Cfs-Cm | |
| P92-si75 | Afs-Gms-Af-Um-Gf-Cm-Uf-Um-C | 259/91 | Gms-Afs-Cm-Cf-Am-Uf-Gm-Cf-C | 331/16 |
| | f-Um-Af-Am-Gf-Gm-Cf-Am-Uf-G | | m-Uf-Um-Af-Gm-Af-Am-Gf-Cm- | 3 |
| | m-Gf-Um-Cf | | Af-Um-Cf-Ums-Cfs-Cm | |
| P92-si76 | Afs-Cms-Af-Am-Cf-Um-Gf-Um-Cf- | 260/92 | Ums-Gfs-Cm-Uf-Cm-Af-Am-Gf-G | 332/16 |
| | Cm-Cf-Um-Cf-Cm-Uf-Um-Gf-Am- | | m-Af-Gm-Gf-Gm-Af-Cm-Af-Gm- | 4 |
| | Gf-Cm-Af | | Uf-Um-Gf-Ums-Ufs-Gm | |
| P92-si77 | Cfs-Ams-Cf-Cm-Cf-Am-Af-Gm-Cf- | 261/93 | Ams-Afs-Am-Uf-Gm-Uf-Cm-Uf-G | 333/16 |
| | Am-Af-Gm-Cf-Am-Gf-Am-Cf-A | | m-Cf-Um-Uf-Gm-Cf-Um-Uf-Gm- | 5 |
| | m-Uf-Um-Uf | | Gf-Gm-Uf-Gms-Gfs-Gm | |
| P92-si78 | Cfs-Ams-Af-Gm-Cf-Am-Af-Gm-Cf- | 262/94 | Ams-Gfs-Am-Uf-Am-Af-Am-Uf-G | 334/16 |
| | Am-Gf-Am-Cf-Am-Uf-Um-Uf-A | | m-Uf-Cm-Uf-Gm-Cf-Um-Uf-Gm- | 6 |
| | m-Uf-Cm-Uf | | Cf-Um-Uf-Gms-Gfs-Gm | |
| P92-si79 | Ufs-Ums-Uf-Gm-Gf-Gm-Uf-Cm-U | 263/95 | Ams-Afs-Cm-Af-Gm-Af-Gm-Af-G | 335/16 |
| | f-Gm-Uf-Cm-Cf-Um-Cf-Um-Cf-U | | m-Gf-Am-Cf-Am-Gf-Am-Cf-Cm-C | 7 |
| | m-Gf-Um-Uf | | f-Am-Af-Ams-Afs-Gm | |
| P92-si80 | Gfs-Ums-Cf-Um-Gf-Um-Cf-Cm-Uf- | 264/96 | Ams-Afs-Gm-Gf-Cm-Af-Am-Cf-A | 336/16 |
| | Cm-Uf-Cm-Uf-Gm-Uf-Um-Gf-Cm- | | m-Gf-Am-Gf-Am-Gf-Gm-Af-Cm- | 8 |
| | Cf-Um-Uf | | Af-Gm-Af-Cms-Cfs-Cm | |

### Example 2: Inhibitory Effect of Alternately Modified Sequences on the PCSK9 Gene

[0273] 2′-OMe and 2′-F alternately modified siRNA sequences synthesized in Example 1 were transfected into HELA cells via lipid nanoparticles (LNP). The inhibitory effect of each sequence on the PCSK9 gene was detected using qPCR technology.

### 1. Experimental Materials

[0274] Test sample: the alternately modified small interfering RNA sequence P92-si1-84 listed in Table 2 (synthesized in Example 1).

[0275] Cell type: HeLa cell line HELA cells

[0276] Drug solvent: DNase/RNase-free water, Gibco Opti-MEM.

### 2. Experimental Methods

[0277] The inhibitory effect of the samples on the mRNA expression of the PCSK9 gene was detected in HELA cell lines using qRT-PCR.

### 2.1 Cell Culture

[0278] The passaged HELA cell line cells were used. The logarithmically growing cells were cultured with 10% fetal bovine serum RPMI 1640 medium (supplemented with 100× penicillin and streptomycin 10 μL/mL) in a cell culture incubator at 37° C. containing 5% CO₂, and the medium was changed once a day. The cells were digested with 0.25% trypsin and centrifuged at 1000 r/min for 5 min. The supernatant was discarded, and fresh culture medium was added for subculture.

### 2.2 Cell Transfection

[0279] Preparation of a transfection mixture: Lipofectamine RNAiMAX and Opti-MEM were mixed in a ratio of 1.5:98.5 and then mixed well by vortex.

[0280] Preparation of transfection reagent: 60 μL of siRNA solution diluted in Opti-MEM was added to 60 μL of the transfection mixture at a ratio of 1:1 (v/v), mixed well by vortex and left to stand at room temperature for 15 min to obtain lipid nanoparticles (LNPs), 12.5 μL of which was used for detection of encapsulation efficiency.

[0281] Transfection reagent for blank control group: 60 μL of the prepared transfection mixture was added to 60 μL of Opti-MEM, mixed well by vortex and left to stand at room temperature for 15 min.

[0282] The prepared transfection reagent was added to a 24-well cell culture plate (100 μL per well) to a final siRNA concentration of 1 nM per well. 500 μL of cell suspension (6×10⁴ cells per ml) was added and mixed well using the cross method. The plate was placed in a 37° C., 5% CO₂ cell culture incubator for 40 h.

2.3 PCSK9 mRNA Detection

### 1) RNA Extraction

[0283] a. The culture medium was removed from the 12-well plate. 0.5 mL of 1×PBS was added to each well to wash the cells, and the PBS was removed. 0.5 mL TRIzol reagent was added to the wells. The cells were pipetted up and down to ensure complete lysis, then transferred to a 1.5 mL RNase-free EP tube, and left to stand at room temperature for 5 min.

[0284] b. Each tube was added with 0.1 mL of chloroform, shaken vigorously for 15 sec, and left to stand at room temperature for 5 min. After centrifugation at 4° C., 12,000×g for 15 min, 200 μL of the supernatant was collected into a new EP tube.

[0285] c. An equal volume of isopropanol was added. The liquid in the tube was gently mixed by inverting the tube upside down, and the tube was left to stand at −20° C. for 10 min. After centrifugation at 4° C., 12,000×g for 15 min, the supernatant was discarded.

[0286] d. 0.5 mL of 75% ethanol was added to gently wash the RNA precipitate. After centrifugation at 4° C., 12,000×g for 5 min, the supernatant was removed. The washing was repeated once. After centrifugation at 4° C. 12,000×g for 1 min, the residual ethanol was removed with a micropipette tip.

[0287] e. The residual ethanol was dried off at room temperature for 2-3 min. 40 μL of RNase-free ddH₂O was added for dissolution.

### 2) RNA Concentration Detection

[0288] The RNA concentration was detected using nanodrop. 2 μL of RNase-free ddH₂O was used as a blank control, and 2 μL of RNA sample was used for detection each time. The sample concentration was recorded.

3) PCSK9 mRNA Quantitative Detection

[0289] In a 15 mL centrifuge tube, the remaining components except primers and template were added in 7.5×84=630 portions, marked as A.

[0290] 84 EP tubes of 1.5 mL were marked. 77 μL of A and 420 ng of total RNA were added to each tube and mixed well for later use (marked as B).

[0291] The upstream and downstream primers of the internal reference gene GAPDH and the target gene PCSK9 were mixed well for later use (marked as C).

[0292] 11 μL of B+1 μL of C were added to each well of a PCR plate, which was covered with a sealing film, centrifuged at 3000 rpm for 1 min, and transferred to the instrument.

[0293] *This step was performed on ice to maintain low temperature conditions.

[0294] The plate was placed into the qPCR instrument and subjected to the following program:
[0295] Reverse transcription: 55° C., 15 min;
[0296] Pre-denaturation: 95° C., 30 sec;
[0297] Cyclic reaction: 95° C., 10 sec; 60° C., 35 sec; 40 cycles;
[0298] Melting curve: 95° C., 15 sec; 60° C., 60 sec; 95° C., 15 sec.

[0299] The running time was about 2 h. The experimental results were analyzed and 2-ΔΔCt was calculated.

### 2.4 Data Processing

[0300] The PCSK9 mRNA expression rate (%) was calculated as follows:

Expression rate=(PCSK9 mRNA expression level/PCSK9 mRNA expression level in blank control group)×100%;

PCSK9 gene expression inhibition rate=1−expression rate (%).

### 3. Experimental Results

[0301] The inhibition rate in this example was the average value of 4 experiments. The inhibition rate of each sequence on the expression of PCSK9 mRNA in HELA cells is shown in Tables 4-6.

[0302] Experimental results show that some sequences alternately modified with 2′-OMe and 2′-F exhibited a significant inhibitory effect on the expression of PCSK9 mRNA in HELA cells with the inhibition rates exceeding 50%, including P92-si5, P92-si51, P92-si81, P92-si82, P92-si84, P92-si3, P92-si8, P92-si9, P92-si21, P92-si31, P92-si73 and P92-si83 (see Table 3 for specific sequences), among which the inhibition rate of P92-si5, P92-si81, P92-si82, P92-si3, P92-si8 and P92-si31 exceeded 70%.

[0303] The other sequences had a relatively poor inhibitory effect on PCSK9 mRNA expression, and the inhibition rates were all lower than 50%.

TABLE 3
siRNA sequences with significant inhibitory effect on PCSK9 gene

| | | SEQ ID NO:/ | | SEQ ID NO:/ |
|---|---|---|---|---|
| | | Corresponding | | Corresponding |
| | | basic | | basic |
| Sequence | Sense strand | sequence | Antisense strand | sequence |
| No. | sequence 5′-3′ | SEQ ID NO: | sequence 5′-3′ | SEQ ID NO: |
| P92- | Afs-Ams-Gf-Am-Uf-Cm-Cf- | 169/1 | Ams-Ufs-Gm-Gf-Am-Af-Gm-Af- | 181/13 |
| si5 | Um-Gf-Cm-Af-Um-Gf-Um-C | | Cm-Af-Um-Gf-Cm-Af-Gm-Gf-A | |
| | f-Um-Uf-Cm-Cf-Am-Uf | | m-Uf-Cm-Uf-Ums-Gfs-Gm | |
| P92- | Ufs-Gms-Gf-Am-Gf-Gm-Cf- | 170/2 | Ams-Ufs-Cm-Cf-Am-Gf-Am-Af- | 182/14 |
| si51 | Um-Uf-Am-Gf-Cm-Uf-Um-U | | Am-Gf-Cm-Uf-Am-Af-Gm-Cf-C | |
| | f-Cm-Uf-Gm-Gf-Am-Uf | | m-Uf-Cm-Cf-Ams-Ufs-Um | |
| P92- | Cfs-Ums-Uf-Um-Uf-Gm-Uf- | 171/3 | Ams-Afs-Um-Af-Um-Cf-Um-Uf- | 183/15 |
| si81 | Am-Af-Cm-Uf-Um-Gf-Am-A | | Cm-Af-Am-Gf-Um-Uf-Am-Cf-A | |
| | f-Gm-Af-Um-Af-Um-Uf | | m-Af-Am-Af-Gms-Cfs-Am | |
| P92- | Gfs-Ams-Af-Gm-Af-Um-Af- | 172/4 | Ams-Afs-Am-Cf-Cm-Cf-Am-Gf- | 184/16 |
| si82 | Um-Uf-Um-Af-Um-Uf-Cm-U | | Am-Af-Um-Af-Am-Af-Um-Af-U | |
| | f-Gm-Gf-Gm-Uf-Um-Uf | | m-Cf-Um-Uf-Cms-Afs-Am | |
| P92- | Gfs-Ums-Uf-Um-Uf-Gm-Uf- | 173/5 | Ums-Ufs-Am-Af-Um-Af-Am-Af- | 185/17 |
| si84 | Am-Gf-Cm-Af-Um-Uf-Um-U | | Am-Af-Um-Gf-Cm-Uf-Am-Cf-A | |
| | f-Um-Af-Um-Uf-Am-Af | | m-Af-Am-Af-Cms-Cfs-Cm | |
| P92- | Cfs-Ams-Cf-Cm-Af-Am-Gf- | 174/6 | Ams-Afs-Gm-Af-Cm-Af-Um-Gf- | 186/18 |
| si3 | Am-Uf-Cm-Cf-Um-Gf-Cm-A | | Cm-Af-Gm-Gf-Am-Uf-Cm-Uf-U | |
| | f-Um-Gf-Um-Cf-Um-Uf | | m-Gf-Gm-Uf-Gms-Afs-Gm | |
| P92- | Cfs-Ums-Cf-Am-Uf-Am-Gf- | 175/7 | Ams-Afs-Um-Af-Am-Af-Cm-Uf- | 187/19 |
| si8 | Gm-Cf-Cm-Uf-Gm-Gf-Am-G | | Cm-Cf-Am-Gf-Gm-Cf-Cm-Uf-A | |
| | f-Um-Uf-Um-Af-Um-Uf | | m-Uf-Gm-Af-Gms-Gfs-Gm | |
| P92- | Gfs-Gms-Cf-Cm-Uf-Gm-Gf- | 176/8 | Ums-Ufs-Um-Cf-Cm-Gf-Am-Af- | 188/20 |
| si9 | Am-Gf-Um-Uf-Um-Af-Um-U | | Um-Af-Am-Af-Cm-Uf-Cm-Cf-A | |
| | f-Cm-Gf-Gm-Af-Am-Af | | m-Gf-Gm-Cf-Cms-Ufs-Am | |
| P92- | Cfs-Ams-Gf-Cm-Af-Cm-Cf- | 177/9 | Ums-Gfs-Um-Gf-Am-Cf-Am-Cf- | 189/21 |
| si21 | Um-Gf-Cm-Uf-Um-Uf-Gm-U | | Am-Af-Am-Gf-Cm-Af-Gm-Gf-U | |
| | f-Gm-Uf-Cm-Af-Cm-Af | | m-Gf-Cm-Uf-Gms-Cfs-Am | |
| P92- | Gfs-Gms-Uf-Cm-Uf-Gm-Gf- | 178/10 | Cms-Ufs-Um-Gf-Am-Cf-Um-Uf- | 190/22 |
| si31 | Am-Af-Um-Gf-Cm-Af-Am-A | | Um-Gf-Cm-Af-Um-Uf-Cm-Cf-A | |
| | f-Gm-Uf-Cm-Af-Am-Gf | | m-Gf-Am-Cf-Cms-Ufs-Gm | |
| P92- | Gfs-Cms-Gf-Gm-Af-Gm-Af- | 179/11 | Ams-Ufs-Gm-Cf-Cm-Uf-Um-Af- | 191/23 |
| si73 | Um-Gf-Cm-Uf-Um-Cf-Um-A | | Gm-Af-Am-Gf-Cm-Af-Um-Cf-U | |
| | f-Am-Gf-Gm-Cf-Am-Uf | | m-Cf-Cm-Gf-Cms-Cfs-Am | |
| P92- | Gfs-Gms-Gf-Um-Uf-Um-Uf- | 180/12 | Ams-Afs-Um-Af-Am-Af-Am-Af- | 192/24 |
| si83 | Gm-Uf-Am-Gf-Cm-Af-Um-U | | Um-Gf-Cm-Uf-Am-Cf-Am-Af-A | |
| | f-Um-Uf-Um-Af-Um-Uf | | m-Af-Cm-Cf-Cms-Afs-Gm | |

[0304] The inhibition rates of PCSK9 mRNA expression in HELA cells by each sequence are shown in Tables 4-6.

[0305] (1) Among the 84 designed sequences, 12 sequences exhibited a significant inhibitory effect on the PCSK9 gene, with inhibition rates exceeding 50%, including P92-si5, P92-si51, P92-si81, P92-si82, and P92-si84, P92-si3, P92-si8, P92-si9, P92-si21, P92-si31, P92-si73 and P92-si83, among which the inhibition rate of P92-si5, P92-si81, P92-si82, P92-si3, P92-si8 and P92-si31 exceeded 70%.

TABLE 4
Alternately modified sequences with a significant inhibitory
effect (inhibition rate exceeding 50%) on the PCSK9 gene

| Basic | | |
|---|---|---|
| sequence | Sequence | Inhibition |
| NO. | No. | rate (%) |
| 5 | P92-si5 | 72.7 |
| 51 | P92-si51 | 61.4 |
| 81 | P92-si81 | 71.8 |
| 82 | P92-si82 | 75.3 |
| 84 | P92-si84 | 66.2 |
| 3 | P92-si3 | 70.9 |
| 8 | P92-si8 | 72.0 |
| 9 | P92-si9 | 63.9 |
| 21 | P92-si21 | 62.8 |
| 31 | P92-si31 | 70.4 |
| 73 | P92-si73 | 60.6 |
| 83 | P92-si83 | 58.8 |

[0306] As can be seen from Table 4, the alternately modified sequences P92-si5, P92-si51, P92-si81, P92-si82, P92-si84, P92-si3, P92-si8, P92-si9, P92-si21, P92-si31, P92-si73 and P92-si83 (see Table 3 for specific sequences), a total of 12 sequences, exhibited a significant inhibitory effect on the expression of PCSK9 mRNA, with the inhibition rates all above 50%, among which the inhibition rate of P92-si5, P92-si81, P92-si82, P92-si3, P92-si8 and P92-si31 exceeded 70% (FIG. 1). These 12 sequences can be used as candidate sequences.

[0307] (2) The inhibition rates of 26 sequences on the PCSK9 gene ranged from 30% to 50%. For example, the inhibition rates of P92-si6 and P92-si7 were 38.3% and 35.7%, respectively.

TABLE 5
Alternately modified sequences with an inhibition
rate of 30%-50% on the PCSK9 gene

| Basic | | |
|---|---|---|
| sequence | Sequence | Inhibition |
| NO. | No. | rate (%) |
| 6 | P92-si6 | 38.3 |
| 7 | P92-si7 | 35.7 |
| 11 | P92-si11 | 33.2 |
| 15 | P92-si15 | 31.6 |
| 17 | P92-si17 | 32.2 |
| 18 | P92-si18 | 48.2 |
| 19 | P92-si19 | 35.1 |
| 25 | P92-si25 | 48.1 |
| 30 | P92-si30 | 31.0 |
| 32 | P92-si32 | 30.1 |
| 33 | P92-si33 | 47.4 |
| 37 | P92-si37 | 37.0 |
| 40 | P92-si40 | 46.0 |
| 47 | P92-si47 | 31.7 |
| 48 | P92-si48 | 40.9 |
| 56 | P92-si56 | 30.3 |
| 59 | P92-si59 | 39.8 |
| 61 | P92-si61 | 37.4 |
| 63 | P92-si63 | 33.6 |
| 65 | P92-si65 | 38.2 |
| 67 | P92-si67 | 35.2 |
| 70 | P92-si70 | 46.4 |
| 71 | P92-si71 | 32.9 |
| 75 | P92-si75 | 40.7 |
| 78 | P92-si78 | 34.1 |
| 80 | P92-si80 | 42.1 |

[0308] The 26 sequences listed in Table 5 exhibited a relatively poor inhibitory effect on the PCSK9 gene, with inhibition rates below 50% and ranging from 30% to 50%. For example, the inhibition rates of P92-si6 and P92-si7 were 38.3% and 35.7%, respectively (FIG. 2).

[0309] (3) The inhibition rates of 46 sequences on the PCSK9 gene were below 30%. For example, the inhibition rates of P92-si1 and P92-si20 were only 9.2% and 6.0%, respectively.

TABLE 6
Alternately modified sequences with an inhibition
rate below 30% on the PCSK9 gene

| Basic | | |
|---|---|---|
| sequence | Sequence | Inhibition |
| NO. | No. | rate (%) |
| 1 | P92-si1 | 9.2 |
| 2 | P92-si2 | 25.0 |
| 4 | P92-si4 | 10.9 |
| 10 | P92-si10 | 10.8 |
| 12 | P92-si12 | −5.7 |
| 13 | P92-si13 | 19.4 |
| 14 | P92-si14 | 17.1 |
| 16 | P92-si16 | −4.6 |
| 20 | P92-si20 | 6.0 |
| 22 | P92-si22 | −2.8 |
| 23 | P92-si23 | 26.1 |
| 24 | P92-si24 | 2.9 |
| 26 | P92-si26 | −2.5 |
| 27 | P92-si27 | 21.6 |
| 28 | P92-si28 | 11.1 |
| 29 | P92-si29 | −6.0 |
| 34 | P92-si34 | −5.4 |
| 35 | P92-si35 | 15.2 |
| 36 | P92-si36 | −3.1 |
| 38 | P92-si38 | 5.5 |
| 39 | P92-si39 | 26.8 |
| 41 | P92-si41 | 10.7 |
| 42 | P92-si42 | 29.7 |
| 43 | P92-si43 | 20.4 |
| 44 | P92-si44 | 15.7 |
| 45 | P92-si45 | 29.7 |
| 46 | P92-si46 | −6.4 |
| 49 | P92-si49 | 29.0 |
| 50 | P92-si50 | 14.6 |
| 52 | P92-si52 | −1.2 |
| 53 | P92-si53 | 28.0 |
| 54 | P92-si54 | 7.3 |
| 55 | P92-si55 | 14.1 |
| 57 | P92-si57 | 18.2 |
| 58 | P92-si58 | 25.4 |
| 60 | P92-si60 | −4.6 |
| 62 | P92-si62 | 4.7 |
| 64 | P92-si64 | −7.9 |
| 66 | P92-si66 | 22.9 |
| 68 | P92-si68 | 11.8 |
| 69 | P92-si69 | −6.0 |
| 72 | P92-si72 | −3.9 |
| 74 | P92-si74 | −1.6 |
| 76 | P92-si76 | 5.2 |
| 77 | P92-si77 | 5.7 |
| 79 | P92-si79 | 25.4 |

[0310] The 46 sequences listed in Table 6 exhibited a very poor inhibitory effect on the expression of PCSK9 mRNA, with the inhibition rate all less than 30%. For example, the inhibition rates of P92-si1 and P92-si20 were only 9.2% and 6.0%, respectively (FIGS. 3 and 4).

[0311] (4) siRNAs with similar sequences had very different activities. For example, the inhibition rate of P92-si5 was 61.8% higher than that of P92-si4, indicating a significant improvement.

[0312] The inhibitory effect of some siRNAs with similar sequences on the PCSK9 mRNA is shown in Table 7.

TABLE 7
Comparison of the inhibition rate on the PCSK9 gene expression
by siRNAs with similar sequences

| | | | | Corres- | | Corres- | |
|---|---|---|---|---|---|---|---|
| | | | | ponding | | ponding | |
| | | | | basic | | basic | Inhi- |
| Similar | Basic | | | sequence | Corresponding | sequence | bition |
| sequence | sequence | Sequence | Corresponding basic | SEQ | basic sequence | SEQ | rate |
| group | NO. | No. | sequence sense strand | ID NO: | antisense strand | ID NO: | (%) |
| A | 4 | P92- | CAAGAUCCUGCAUGU | 27 | UGGAAGACAUGCAGGA | 99 | 10.9 |
| | | si4 | CUUCCA | | UCUUGGU | | |
| | 5 | P92- | AAGAUCCUGCAUGUC | 1 | AUGGAAGACAUGCAGG | 13 | 72.7 |
| | | si5 | UUCCAU | | AUCUUGG | | |
| B | 50 | P92- | GAUUAAUGGAGGCUU | 68 | AAAGCUAAGCCUCCAUU | 140 | 14.6 |
| | | si50 | AGCUUU | | AAUCAG | | |
| | 51 | P92- | UGGAGGCUUAGCUUU | 2 | AUCCAGAAAGCUAAGCC | 14 | 61.4 |
| | | si51 | CUGGAU | | UCCAUU | | |
| C | 2 | P92- | AUACCUCACCAAGAU | 26 | UGCAGGAUCUUGGUGA | 98 | 25.0 |
| | | si2 | CCUGCA | | GGUAUCC | | |
| | 3 | P92- | CACCAAGAUCCUGCA | 6 | AAGACAUGCAGGAUCUU | 18 | 70.9 |
| | | si3 | UGUCUU | | GGUGAG | | |
| D | 9 | P92- | GGCCUGGAGUUUAUU | 8 | UUUCCGAAUAAACUCCA | 20 | 63.9 |
| | | si9 | CGGAAA | | GGCCUA | | |
| | 10 | P92- | CCUGGAGUUUAUUCG | 30 | CUUUUCCGAAUAAACUC | 102 | 10.8 |
| | | si10 | GAAAAG | | CAGGCC | | |
| E | 21 | P92- | CAGCACCUGCUUUGU | 9 | UGUGACACAAAGCAGG | 21 | 62.8 |
| | | si21 | GUCACA | | UGCUGCA | | |
| | 22 | P92- | GCACCUGCUUUGUGU | 41 | UCUGUGACACAAAGCAG | 113 | -2.8 |
| | | si22 | CACAGA | | GUGCUG | | |
| F | 30 | P92- | AGGUCUGGAAUGCAA | 49 | UUGACUUUGCAUUCCAG | 121 | 31.0 |
| | | si30 | AGUCAA | | ACCUGG | | |
| | 31 | P92- | GGUCUGGAAUGCAAA | 10 | CUUGACUUUGCAUUCCA | 22 | 70.4 |
| | | si31 | GUCAAG | | GACCUG | | |
| G | 73 | P92- | GCGGAGAUGCUUCUA | 11 | AUGCCUUAGAAGCAUCU | 23 | 60.6 |
| | | si73 | AGGCAU | | CCGCCA | | |
| | 74 | P92- | CGGAGAUGCUUCUAA | 90 | CAUGCCUUAGAAGCAUC | 162 | −1.6 |
| | | si74 | GGCAUG | | UCCGCC | | |

[0313] It can be seen from Table 7 that some siRNAs with similar sequences exhibited very different inhibitory effects on the expression of PCSK9 mRNA.

[0314] Basic sequence 5 differs from basic sequence 4 only in the terminal 1 base. For the sense strand, there is one more C at the 5′-end of basic sequence 4 and one more U at the 3′-end of basic sequence 5, and the remaining bases are identical. For the antisense strand, there is one more U at the 3′-end of basic sequence 4 and one more A at the 5′-end of basic sequence 5, and the remaining bases are identical. However, the inhibition rate of the alternately modified sequence P92-si5 was 61.8% higher than that of P92-si4, indicating a significant improvement.

[0315] Basic sequence 51 differs from basic sequence 50 only in the terminal 6 bases. For the sense strand, the 5′-end of the basic sequence 50 is GAUUAA, the 3′-end of the sequence 51 is CUGGAU, and the remaining bases are identical. For the antisense strand, the 3′-end of the basic sequence 50 is AAUCAG, the 5′-end of the basic sequence 51 is AUCCAG, and the remaining bases are identical. However, the inhibition rate of the alternately modified sequence P92-si51 was 46.8% higher than that of P92-si50, indicating a significant improvement.

[0316] Basic sequence 3 differs from basic sequence 2 only in the terminal 6 bases. For the sense strand, the 5′-end of basic sequence 2 is AUACCU, the 3′-end of basic sequence 3 is UGUCUU, and the remaining bases are identical. For the antisense strand, the 3′-end of basic sequence 2 is GUAUCC, the 5′-end of basic sequence 3 is AAGACA, and the remaining bases are identical. However, the inhibition rate of the alternately modified sequence P92-si3 was 45.9% higher than that of P92-si2, indicating a significant improvement.

[0317] Basic sequence 10 differs from basic sequence 9 only in the terminal 2 bases. For the sense strand, the 5′-end of basic sequence 9 is GG, the 3′-end of basic sequence 10 is AG, and the remaining bases are identical. For the antisense strand, the 3′-end of basic sequence 9 is UA, the 5′-end of basic sequence 10 is CU, and the remaining bases are identical. However, the inhibition rate of the alternately modified sequence P92-si9 was 53.1% higher than that of the sequence P92-si10, indicating a significant improvement.

[0318] Basic sequence 22 differs from basic sequence 21 only in the terminal 2 bases. For the sense strand, the 5′-end of basic sequence 21 is CA, the 3′-end of basic sequence 22 is GA, and the remaining bases are identical. For the antisense strand, the 3′-end of basic sequence 21 is CA, the 5′-end of basic sequence 22 is UC, and the remaining bases are identical. However, the inhibition rate of the alternately modified sequence P92-si21 was 65.6% higher than that of P92-si22, indicating a significant improvement.

[0319] Basic sequence 30 differs from basic sequence 31 only in the terminal 1 base. For the sense strand, the 5′-end of basic sequence 30 is A, the 3′-end of basic sequence 31 is G, and the remaining bases are identical. For the antisense strand, the 3′-end of basic sequence 30 is G, the 5′-end of basic sequence 31 is C, and the remaining bases are identical. However, the inhibition rate of the alternately modified sequence P92-si31 was 39.4% higher than that of P92-si30, indicating a significant improvement.

[0320] Basic sequence 73 differs from basic sequence 74 only in the terminal 1 base. For the sense strand, the 5′-end of the basic sequence 73 is G, the 3′-end of the basic sequence 74 is G, and the remaining bases are identical. For the antisense strand, the 3′-end of the basic sequence 73 is A, the 5′-end of the basic sequence 74 is C, and the remaining bases are identical. However, the inhibition rate of the alternately modified sequence P92-si73 was 62.2% higher than that of P92-si74, indicating a significant improvement.

[0321] Therefore, it is not easy to screen out sequences with significant inhibitory activity from a very large number of oligonucleotide sequences designed against the PCSK9 mRNA sequence, and a lot of inventive work is required.

### SUMMARY

[0322] (1) Among the 84 designed sequences, 12 sequences exhibited significant inhibitory effects on the PCSK9 gene, with inhibition rates exceeding 50%, including P92-si5, P92-si51, P92-si81, P92-si82, P92-si84, P92-si3, P92-si8, P92-si9, P92-si21, P92-si31, P92-si73 and P92-si83, among which the inhibition rates of P92-si5, P92-si81, P92-si82, P92-si3, P92-si8 and P92-si31 exceeded 70%.

[0323] (2) The inhibition rates of 26 sequences on the PCSK9 gene were 30%-50%. For example, the inhibition rates of P92-si6 and P92-si7 were 38.3% and 35.7%, respectively.

[0324] (3) The inhibition rates of 46 sequences on the PCSK9 gene were less than 30%. For example, the inhibition rates of P92-si1 and P92-si20 were only 9.2% and 6.0%, respectively.

[0325] (4) siRNAs with similar sequences had very different activities. For example, the inhibition rate of P92-si5 was 61.8% higher than that of P92-si4, indicating a significant improvement. Therefore, it is not easy to screen out sequences with significant inhibitory activity from a very large number of oligonucleotide sequences designed against the PCSK9 mRNA sequence, and a lot of inventive work is required.

### Example 3: Inhibitory Effect of Unmodified Sequence on PCSK9 Gene

[0326] In this example, some unmodified sequences corresponding to the modified sequences in Example 2 were synthesized and transfected into HELA cells via lipid nanoparticles (LNPs). The inhibitory effect of each unmodified sequence on the PCSK9 gene was detected using qPCR technology, and unmodified siRNA sequences with good inhibitory effects were screened out.

### 1. Experimental Materials

### Test Samples:

[0327] The unmodified siRNA sequences are listed in Table 8. All sequences were synthesized according to the method in Example 1.

TABLE 8
Unmodified siRNA sequences

| Sequence | Sense strand sequence | SEQ ID | Antisense strand sequence | SEQ ID |
|---|---|---|---|---|
| No. | (Basic sequence) 5′-3′ | NO: | (Basic sequence) 5′-3′ | NO: |
| si5 | AAGAUCCUGCAUGUCUUCC | 1 | AUGGAAGACAUGCAGGAUCU | 13 |
| | AU | | UGG | |
| si51 | UGGAGGCUUAGCUUUCUGG | 2 | AUCCAGAAAGCUAAGCCUCCA | 14 |
| | AU | | UU | |
| si81 | CUUUUGUAACUUGAAGAU | 3 | AAUAUCUUCAAGUUACAAAA | 15 |
| | AUU | | GCA | |
| si82 | GAAGAUAUUUAUUCUGGG | 4 | AAACCCAGAAUAAAUAUCUU | 16 |
| | UUU | | CAA | |
| si84 | GUUUUGUAGCAUUUUUAU | 5 | UUAAUAAAAAUGCUACAAAA | 17 |
| | UAA | | CCC | |
| si3 | CACCAAGAUCCUGCAUGUC | 6 | AAGACAUGCAGGAUCUUGGU | 18 |
| | UU | | GAG | |
| si8 | CUCAUAGGCCUGGAGUUUA | 7 | AAUAAACUCCAGGCCUAUGA | 19 |
| | UU | | GGG | |
| si9 | GGCCUGGAGUUUAUUCGGA | 8 | UUUCCGAAUAAACUCCAGGCC | 20 |
| | AA | | UA | |
| si21 | CAGCACCUGCUUUGUGUCA | 9 | UGUGACACAAAGCAGGUGCU | 21 |
| | CA | | GCA | |
| si31 | GGUCUGGAAUGCAAAGUCA | 10 | CUUGACUUUGCAUUCCAGACC | 22 |
| | AG | | UG | |
| si73 | GCGGAGAUGCUUCUAAGGC | 11 | AUGCCUUAGAAGCAUCUCCGC | 23 |
| | AU | | CA | |
| si83 | GGGUUUUGUAGCAUUUUU | 12 | AAUAAAAAUGCUACAAAACC | 24 |
| | AUU | | CAG | |
| si1 | GGGAUACCUCACCAAGAUC | 25 | AGGAUCUUGGUGAGGUAUCC | 97 |
| | CU | | CCG | |
| si2 | AUACCUCACCAAGAUCCUG | 26 | UGCAGGAUCUUGGUGAGGUA | 98 |
| | CA | | UCC | |
| si4 | CAAGAUCCUGCAUGUCUUC | 27 | UGGAAGACAUGCAGGAUCUU | 99 |
| | CA | | GGU | |
| si6 | GGCUUCCUGGUGAAGAUGA | 28 | ACUCAUCUUCACCAGGAAGCC | 100 |
| | GU | | AG | |
| si7 | GCUGGAGCUGGCCUUGAAG | 29 | AACUUCAAGGCCAGCUCCAGC | 101 |
| | UU | | AG | |
| si10 | CCUGGAGUUUAUUCGGAAA | 30 | CUUUUCCGAAUAAACUCCAGG | 102 |
| | AG | | CC | |
| si11 | GCCAGCUGGUCCAGCCUGU | 31 | CCACAGGCUGGACCAGCUGGC | 103 |
| | GG | | UU | |
| si12 | ACUGGUGGUGCUGCUGCCC | 32 | AGGGGCAGCAGCACCACCAGU | 104 |
| | CU | | GG | |
| si13 | UGCCCCUGGCGGGUGGGUA | 33 | UGUACCCACCCGCCAGGGGCA | 105 |
| | CA | | GC | |
| si14 | UGGGUACAGCCGCGUCCUC | 34 | UUGAGGACGCGGCUGUACCCA | 106 |
| | AA | | CC | |
| si15 | CGUCCUCAACGCCGCCUGC | 35 | UGGCAGGCGGCGUUGAGGAC | 107 |
| | CA | | GCG | |
| si16 | GGUCGUGCUGGUCACCGCU | 36 | GCAGCGGUGACCAGCACGACC | 108 |
| | GC | | CC | |
| si17 | AGGACAUCAUUGGUGCCUC | 37 | UGGAGGCACCAAUGAUGUCC | 109 |
| | CA | | UCC | |
| si18 | UCAUUGGUGCCUCCAGCGA | 38 | AGUCGCUGGAGGCACCAAUG | 110 |
| | CU | | AUG | |
| si19 | GUGCCUCCAGCGACUGCAG | 39 | UGCUGCAGUCGCUGGAGGCAC | 111 |
| | CA | | CA | |
| si20 | AGCGACUGCAGCACCUGCU | 40 | AAAGCAGGUGCUGCAGUCGC | 112 |
| | UU | | UGG | |
| si22 | GCACCUGCUUUGUGUCACA | 41 | UCUGUGACACAAAGCAGGUG | 113 |
| | GA | | CUG | |
| si23 | CUUUGUGUCACAGAGUGGG | 42 | GUCCCACUCUGUGACACAAAG | 114 |
| | AC | | CA | |
| si24 | AGUGGGACAUCACAGGCUG | 43 | AGCAGCCUGUGAUGUCCCACU | 115 |
| | CU | | CU | |
| si25 | AUCACAGGCUGCUGCCCAC | 44 | ACGUGGGCAGCAGCCUGUGA | 116 |
| | GU | | UGU | |
| si26 | UGUCUGCCGAGCCGGAGCU | 45 | UGAGCUCCGGCUCGGCAGACA | 117 |
| | CA | | GC | |
| si27 | GGCCGAGUUGAGGCAGAGA | 46 | AGUCUCUGCCUCAACUCGGCC | 118 |
| | CU | | AG | |
| si28 | CAUCCACGCUUCCUGCUGC | 47 | UGGCAGCAGGAAGCGUGGAU | 119 |
| | CA | | GCU | |
| si29 | CCCAGGUCUGGAAUGCAAA | 48 | ACUUUGCAUUCCAGACCUGGG | 120 |
| | GU | | GC | |
| si30 | AGGUCUGGAAUGCAAAGUC | 49 | UUGACUUUGCAUUCCAGACCU | 121 |
| | AA | | GG | |
| si32 | GAAUGCAAAGUCAAGGAGC | 50 | AUGCUCCUUGACUUUGCAUUC | 122 |
| | AU | | CA | |
| si33 | CAAAGUCAAGGAGCAUGGA | 51 | AUUCCAUGCUCCUUGACUUUG | 123 |
| | AU | | CA | |
| si34 | CCCUCAGGAGCAGGUGACC | 52 | ACGGUCACCUGCUCCUGAGGG | 124 |
| | GU | | GC | |
| si35 | GAGGAGGGCUGGACCCUGA | 53 | AGUCAGGGUCCAGCCCUCCUC | 125 |
| | CU | | GC | |
| si36 | GCUGCAGUGCCCUCCCUGG | 54 | UCCCAGGGAGGGCACUGCAGC | 126 |
| | GA | | CA | |
| si37 | CCUCCCUGGGACCUCCCAC | 55 | ACGUGGGAGGUCCCAGGGAG | 127 |
| | GU | | GGC | |
| si38 | CCCUGGGACCUCCCACGUC | 56 | AGGACGUGGGAGGUCCCAGG | 128 |
| | CU | | GAG | |
| si39 | GGGCCUACGCCGUAGACAA | 57 | UGUUGUCUACGGCGUAGGCCC | 129 |
| | CA | | CC | |
| si40 | GCCGUAGACAACACGUGUG | 58 | UACACACGUGUUGUCUACGGC | 130 |
| | UA | | GU | |
| si41 | CCGUAGACAACACGUGUGU | 59 | CUACACACGUGUUGUCUACGG | 131 |
| | AG | | CG | |
| si42 | UAGACAACACGUGUGUAGU | 60 | UGACUACACACGUGUUGUCU | 132 |
| | CA | | ACG | |
| si43 | GUGUGUAGUCAGGAGCCGG | 61 | UCCCGGCUCCUGACUACACAC | 133 |
| | GA | | GU | |
| si44 | GAGCCGGGACGUCAGCACU | 62 | GUAGUGCUGACGUCCCGGCUC | 134 |
| | AC | | CU | |
| si45 | UCAGCACUACAGGCAGCAC | 63 | UGGUGCUGCCUGUAGUGCUG | 135 |
| | CA | | ACG | |
| si46 | UCUCCAGCUAACUGUGGAG | 64 | UUCUCCACAGUUAGCUGGAG | 136 |
| | AA | | AUG | |
| si47 | GCUCCCUGAUUAAUGGAGG | 65 | AGCCUCCAUUAAUCAGGGAGC | 137 |
| | CU | | CC | |
| si48 | UCCCUGAUUAAUGGAGGCU | 66 | UAAGCCUCCAUUAAUCAGGG | 138 |
| | UA | | AGC | |
| si49 | CCUGAUUAAUGGAGGCUUA | 67 | GCUAAGCCUCCAUUAAUCAGG | 139 |
| | GC | | GA | |
| si50 | GAUUAAUGGAGGCUUAGC | 68 | AAAGCUAAGCCUCCAUUAAUC | 140 |
| | UUU | | AG | |
| si52 | GGUGGUCACAGGCUGUGCC | 69 | AAGGCACAGCCUGUGACCACC | 141 |
| | UU | | AG | |
| si53 | UCACAGGCUGUGCCUUGGU | 70 | AAACCAAGGCACAGCCUGUGA | 142 |
| | UU | | CC | |
| si54 | GUGCCUUGGUUUCCUGAGC | 71 | UGGCUCAGGAAACCAAGGCAC | 143 |
| | CA | | AG | |
| si55 | AGCCACCUUUACUCUGCUC | 72 | UAGAGCAGAGUAAAGGUGGC | 144 |
| | UA | | UCA | |
| si56 | CCACCUUUACUCUGCUCUA | 73 | CAUAGAGCAGAGUAAAGGUG | 145 |
| | UG | | GCU | |
| si57 | CUUUACUCUGCUCUAUGCC | 74 | CUGGCAUAGAGCAGAGUAAA | 146 |
| | AG | | GGU | |
| si58 | GCUGUGCUAGCAACACCCA | 75 | UUUGGGUGUUGCUAGCACAG | 147 |
| | AA | | CCU | |
| si59 | UCACCUAGGACUGACUCGG | 76 | UGCCGAGUCAGUCCUAGGUG | 148 |
| | CA | | AUG | |
| si60 | ACUGACUCGGCAGUGUGCA | 77 | ACUGCACACUGCCGAGUCAGU | 149 |
| | GU | | CC | |
| si61 | UCGGCAGUGUGCAGUGGUG | 78 | UGCACCACUGCACACUGCCGA | 150 |
| | CA | | GU | |
| si62 | GGCAGUGUGCAGUGGUGCA | 79 | CAUGCACCACUGCACACUGCC | 151 |
| | UG | | GA | |
| si63 | GCAGUGGUGCAUGCACUGU | 80 | AGACAGUGCAUGCACCACUGC | 152 |
| | CU | | AC | |
| si64 | GUGCAUGCACUGUCUCAGC | 81 | UGGCUGAGACAGUGCAUGCA | 153 |
| | CA | | CCA | |
| si65 | AACCCGCUCCACUACCCGG | 82 | UGCCGGGUAGUGGAGCGGGU | 154 |
| | CA | | UGG | |
| si66 | ACUACCCGGCAGGGUACAC | 83 | AUGUGUACCCUGCCGGGUAG | 155 |
| | AU | | UGG | |
| si67 | CCUACUUCACAGAGGAAGA | 84 | UUUCUUCCUCUGUGAAGUAG | 156 |
| | AA | | GGG | |
| si68 | CCAGGAAGCUCGGUGAGUG | 85 | AUCACUCACCGAGCUUCCUGG | 157 |
| | AU | | UC | |
| si69 | AGAACGAUGCCUGCAGGCA | 86 | CAUGCCUGCAGGCAUCGUUCU | 158 |
| | UG | | GC | |
| si70 | UGCCUGCAGGCAUGGAACU | 87 | AAAGUUCCAUGCCUGCAGGCA | 159 |
| | UU | | UC | |
| si71 | CGUUAUCACCCAGGCCUGA | 88 | AAUCAGGCCUGGGUGAUAAC | 160 |
| | UU | | GGA | |
| si72 | CACCCAGGCCUGAUUCACU | 89 | CCAGUGAAUCAGGCCUGGGU | 161 |
| | GG | | GAU | |
| si74 | CGGAGAUGCUUCUAAGGCA | 90 | CAUGCCUUAGAAGCAUCUCCG | 162 |
| | UG | | CC | |
| si75 | AGAUGCUUCUAAGGCAUGG | 91 | GACCAUGCCUUAGAAGCAUCU | 163 |
| | UC | | CC | |
| si76 | ACAACUGUCCCUCCUUGAG | 92 | UGCUCAAGGAGGGACAGUUG | 164 |
| | CA | | UUG | |
| si77 | CACCCAAGCAAGCAGACAU | 93 | AAAUGUCUGCUUGCUUGGGU | 165 |
| | UU | | GGG | |
| si78 | CAAGCAAGCAGACAUUUAU | 94 | AGAUAAAUGUCUGCUUGCUU | 166 |
| | CU | | GGG | |
| si79 | UUUGGGUCUGUCCUCUCUG | 95 | AACAGAGAGGACAGACCCAA | 167 |
| | UU | | AAG | |
| si80 | GUCUGUCCUCUCUGUUGCC | 96 | AAGGCAACAGAGAGGACAGA | 168 |
| | UU | | CCC | |

[0328] Cell type: HeLa cell line HELA cells

[0329] Drug solvent: DNase/RNase-free water, Gibco Opti-MEM.

### 2. Experimental Methods

[0330] Refer to Example 2.

### 3. Experimental Results

[0331] The inhibition rates of PCSK9 mRNA expression by each unmodified sequence are shown in Tables 9 and 10.

[0332] The unmodified sequences si5, si51, si81, si82, si84, si3, si8, si9, si21, si31, si73 and si83 exhibited a significant inhibitory effect on the expression of PCSK9 mRNA in HELA cells, with inhibition rates all above 50%, among which the inhibition rates of si5, si81, si82, si3 and si8 exceeded 60%.

[0333] (1) 12 unmodified sequences exhibited a significant inhibitory effect on the PCSK9 gene, with inhibition rates exceeding 50%, including si5, si51, si81, si82, si84, si3, si8, si9, si21, si31, si73 and si83, among which the inhibition rates of si5, si81, si82, si3 and si8 exceeded 60%.

TABLE 9
Unmodified sequences with a significant inhibitory effect
(inhibition rate higher than 50%) on the PCSK9 gene

| Basic | | |
|---|---|---|
| sequence | Sequence | Inhibition |
| NO. | No. | rate (%) |
| 5 | si5 | 60.3 |
| 51 | si51 | 53.4 |
| 81 | si81 | 62.0 |
| 82 | si82 | 63.1 |
| 84 | si84 | 55.7 |
| 3 | si3 | 62.3 |
| 8 | si8 | 60.6 |
| 9 | si9 | 52.6 |
| 21 | si21 | 51.2 |
| 31 | si31 | 59.2 |
| 73 | si73 | 52.4 |
| 83 | si83 | 50.1 |

[0334] The unmodified sequences listed in Table 9, including si5, si51, si81, si82, si84, si3, si8, si9, si21, si31, si73 and si83, exhibited a significant inhibitory effect on the expression of PCSK9 mRNA, with an inhibition rate all above 50%, among which the inhibition rate of si5, si81, si82, si3 and si8 exceeded 60% (FIG. 5). These 12 sequences can be used as candidate sequences.

[0335] (2) The inhibition rates of other unmodified sequences on the PCSK9 gene were less than 40%. For example, the inhibition rates of si52 and si74 were only 0.5% and 2.2%, respectively.

TABLE 10
Unmodified sequences with an inhibition
rate lower than 40% on the PCSK9 gene

| Basic | | |
|---|---|---|
| sequence | Sequence | Inhibition |
| NO. | No. | rate (%) |
| 2 | si2 | 19.6 |
| 4 | si4 | 9.1 |
| 6 | si6 | 31.5 |
| 7 | si7 | 31.1 |
| 10 | si10 | 11.4 |
| 20 | si20 | −3.0 |
| 30 | si30 | 26.7 |
| 32 | si32 | 27.3 |
| 50 | si50 | 10.8 |
| 52 | si52 | 0.5 |
| 22 | si22 | −2.0 |
| 72 | si72 | 1.0 |
| 74 | si74 | 2.2 |
| 80 | si80 | 38.5 |

[0336] Each sequence in Table 10 exhibited a very poor inhibitory effect on the expression of PCSK9 mRNA, with an inhibition rate less than 40%. For example, the inhibition rates of si52 and si74 were only 0.5% and 2.2%, respectively (FIG. 6).

[0337] (3) siRNAs with similar sequences had very different activities. For example, the inhibition rate of basic sequence 5 was 51.2% higher than that of basic sequence 4, indicating a significant improvement.

[0338] A comparison of the inhibitory effects of some siRNAs with similar sequences on PCSK9 mRNA is shown in Table 11.

TABLE 11
Comparison of the inhibition rate on the PCSK9 gene
expression by unmodified sequences with similar sequences

| | | | | Basic | | Basic | |
|---|---|---|---|---|---|---|---|
| Similar | Basic | | | sequence | | sequence | Inhibition |
| sequence | sequence | Sequence | | SEQ | | SEQ | rate |
| group | NO. | No. | Sense strand | ID NO: | Antisense strand | ID NO: | (%) |
| A | 4 | si4 | CAAGAUCCUGCAUGU | 27 | UGGAAGACAUGCAGGA | 99 | 9.1 |
| | | | CUUCCA | | UCUUGGU | | |
| | 5 | si5 | AAGAUCCUGCAUGUC | 1 | AUGGAAGACAUGCAGG | 13 | 60.3 |
| | | | UUCCAU | | AUCUUGG | | |
| B | 50 | si50 | GAUUAAUGGAGGCUU | 68 | AAAGCUAAGCCUCCAUU | 140 | 10.8 |
| | | | AGCUUU | | AAUCAG | | |
| | 51 | si51 | UGGAGGCUUAGCUUU | 2 | AUCCAGAAAGCUAAGCC | 14 | 53.4 |
| | | | CUGGAU | | UCCAUU | | |
| C | 2 | si2 | AUACCUCACCAAGAUC | 26 | UGCAGGAUCUUGGUGA | 98 | 19.6 |
| | | | CUGCA | | GGUAUCC | | |
| | 3 | si3 | CACCAAGAUCCUGCA | 6 | AAGACAUGCAGGAUCUU | 18 | 62.3 |
| | | | UGUCUU | | GGUGAG | | |
| D | 9 | si9 | GGCCUGGAGUUUAUU | 8 | UUUCCGAAUAAACUCCA | 20 | 52.6 |
| | | | CGGAAA | | GGCCUA | | |
| | 10 | si10 | CCUGGAGUUUAUUCG | 30 | CUUUUCCGAAUAAACUC | 102 | 11.4 |
| | | | GAAAAG | | CAGGCC | | |
| E | 21 | 21 | CAGCACCUGCUUUGU | 9 | UGUGACACAAAGCAGG | 21 | 51.2 |
| | | | GUCACA | | UGCUGCA | | |
| | 22 | 22 | GCACCUGCUUUGUGU | 41 | UCUGUGACACAAAGCAG | 113 | −2.0 |
| | | | CACAGA | | GUGCUG | | |
| F | 30 | 30 | AGGUCUGGAAUGCAA | 49 | UUGACUUUGCAUUCCAG | 121 | 26.7 |
| | | | AGUCAA | | ACCUGG | | |
| | 31 | 31 | GGUCUGGAAUGCAAA | 10 | CUUGACUUUGCAUUCCA | 22 | 59.2 |
| | | | GUCAAG | | GACCUG | | |
| G | 73 | 73 | GCGGAGAUGCUUCUA | 11 | AUGCCUUAGAAGCAUCU | 23 | 52.4 |
| | | | AGGCAU | | CCGCCA | | |
| | 74 | 74 | CGGAGAUGCUUCUAA | 90 | CAUGCCUUAGAAGCAUC | 162 | 2.2 |
| | | | GGCAUG | | UCCGCC | | |

[0339] It can be seen from Table 11 that some siRNAs with similar sequences exhibited very different inhibitory effects on PCSK9 mRNA expression.

[0340] Basic sequence 5 differs from basic sequence 4 only in the terminal 1 base. For the sense strand, there is one more C at the 5′-end of basic sequence 4 and one more U at the 3′-end of basic sequence 5, and the remaining bases are identical. For the antisense strand, there is one more U at the 3′-end of basic sequence 4 and one more A at the 5′-end of the basic sequence 5, and the remaining bases are identical. However, the inhibition rate of basic sequence 5 is 51.2% higher than that of basic sequence 4, indicating a significant improvement.

[0341] Basic sequence 51 differs from basic sequence 50 only in the terminal 6 bases. For the sense strand, the 5′-end of the basic sequence 50 is GAUUAA, the 3′-end of the basic sequence 51 is CUGGAU, and the remaining bases are identical. For the antisense strand, the 3′-end of the basic sequence 50 is AAUCAG, the 5′-end of the basic sequence 51 is AUCCAG, and the remaining bases are identical. However, the inhibition rate of basic sequence 51 is 42.6% higher than that of basic sequence 50, indicating a significant improvement.

[0342] Basic sequence 3 differs from basic sequence 2 only in the terminal 6 bases. For the sense strand, the 5′-end of basic sequence 2 is AUACCU, the 3′-end of basic sequence 3 is UGUCUU, and the remaining bases are identical. For the antisense strand, the 3′-end of basic sequence 2 is GUAUCC, the 5′-end of basic sequence 3 is AAGACA, and the remaining bases are identical. However, the inhibition rate of basic sequence 3 is 42.7% higher than that of basic sequence 2, indicating a significant improvement.

[0343] Basic sequence 10 differs from basic sequence 9 only in the terminal 2 bases. For the sense strand, the 5′-end of basic sequence 9 is GG, the 3′-end of basic sequence 10 is AG, and the remaining bases are identical. For the antisense strand, the 3′-end of basic sequence 9 is UA, the 5′-end of basic sequence 10 is CU, and the remaining bases are identical. However, the inhibition rate of basic sequence 9 is 41.2% higher than that of basic sequence 10, indicating a significant improvement.

[0344] Basic sequence 22 differs from basic sequence 21 only in the terminal two bases. For the sense strand, the 5′-end of basic sequence 21 is CA, the 3′-end of basic sequence 22 is GA, and the remaining bases are identical. For the antisense strand, the 3′-end of basic sequence 21 is CA, the 5′-end of basic sequence 22 is UC, and the remaining bases are identical. However, the inhibition rate of basic sequence 21 is 53.2% higher than that of basic sequence 22, indicating a significant improvement.

[0345] Basic sequence 30 differs from basic sequence 31 only in the terminal 1 base. For the sense strand, the 5′-end of basic sequence 30 is A, the 3′-end of basic sequence 31 is G, and the remaining bases are identical. For the antisense strand, the 3′-end of basic sequence 30 is G, the 5′-end of basic sequence 31 is C, and the remaining bases are identical. However, the inhibition rate of basic sequence 31 is 32.5% higher than that of basic sequence 30, indicating a significant improvement.

[0346] Basic sequence 73 differs from basic sequence 74 only in the terminal 1 base. For the sense strand, the 5′-end of the basic sequence 73 is G, the 3′-end of the basic sequence 74 is G, and the remaining bases are identical. For the antisense strand, the 3′-end of the basic sequence 73 is A, the 5′-end of the basic sequence 74 is C, and the remaining bases are identical. However, the inhibition rate of basic sequence 73 is 50.2% higher than that of basic sequence 74, indicating a significant improvement.

[0347] Therefore, it is not easy to screen out sequences with significant inhibitory activity from a very large number of oligonucleotide sequences designed against the PCSK9 mRNA sequence, and a lot of inventive work is required.

[0348] (4) Different sequences exhibited disparate effects on activity after alternate modifications. Some inhibition rates demonstrated a notable enhancement, exemplified by basic sequence 5, whose alternately modified sequence exhibited an elevated inhibition rate of 12.4% relative to its unmodified sequence. Conversely, some inhibition rates exhibited a less pronounced alteration, as observed in basic sequences 4, 22, and 52, where the inhibition rates of alternately modified and unmodified sequences exhibited minimal deviation.

TABLE 12
Comparison of the inhibition rate on the PCSK9 gene between
alternately modified sequences and unmodified sequences

| | | | Inhibition | |
|---|---|---|---|---|
| | | Inhibition | rate of the | |
| Basic | | rate of the | alternately | Increase in |
| sequence | Sequence | unmodified | modified | inhibition |
| NO. | No. | sequence (%) | sequence (%) | rate (%) |
| 5 | si5 | 60.3 | 72.7 | 12.4 |
| 51 | si51 | 53.4 | 61.4 | 8.0 |
| 81 | si81 | 62.0 | 71.8 | 9.8 |
| 82 | si82 | 63.1 | 75.3 | 12.2 |
| 84 | si84 | 55.7 | 66.2 | 10.5 |
| 3 | si3 | 62.3 | 70.9 | 8.6 |
| 8 | si8 | 60.6 | 72.0 | 11.4 |
| 9 | si9 | 52.6 | 63.9 | 11.3 |
| 21 | si21 | 51.2 | 62.8 | 11.6 |
| 31 | si31 | 59.2 | 70.4 | 11.2 |
| 73 | si73 | 52.4 | 60.6 | 8.2 |
| 83 | si83 | 50.1 | 58.8 | 8.7 |
| 2 | si2 | 19.6 | 25.0 | 5.4 |
| 4 | si4 | 9.1 | 10.9 | 1.8 |
| 6 | si6 | 31.5 | 38.3 | 6.8 |
| 7 | si7 | 31.1 | 35.7 | 4.6 |
| 10 | si10 | 11.4 | 10.8 | −0.6 |
| 20 | si20 | −3.0 | 6.0 | 9.0 |
| 22 | si22 | −2.0 | −2.8 | −0.8 |
| 30 | si30 | 26.7 | 31.0 | 4.3 |
| 32 | si32 | 27.3 | 30.1 | 2.8 |
| 50 | si50 | 10.8 | 14.6 | 3.8 |
| 52 | si52 | 0.5 | −1.2 | −1.7 |
| 72 | si72 | 1.0 | −3.9 | −4.9 |
| 74 | si74 | 2.2 | −1.6 | −3.8 |
| 80 | si80 | 38.5 | 42.1 | 3.6 |

[0349] It can be seen from Table 12 that different alternately modified sequences exhibited inconsistent effects on the inhibition rate of PCSK9 mRNA. Some were significantly improved; for example, the inhibition rate of basic sequence 5 with alternate modifications was 12.4% higher than that of the unmodified sequence, and the inhibition rate of basic sequence 82 with alternate modifications was 12.2% higher than that of the unmodified sequence. Some were not obvious; for example, for basic sequences 4, 22 and 52, the inhibition rates of alternately modified sequences and unmodified sequences were basically unchanged.

[0350] Therefore, not all unmodified sequences can improve their activity through alternate modifications, and alternate modifications have inconsistent effects on the activity of different sequences.

### SUMMARY

[0351] (1) 12 unmodified sequences exhibited a significant inhibitory effect on the PCSK9 gene, with inhibition rates exceeding 50%, including si5, si51, si81, si82, si84, si3, si8, si9, si21, si31, si73 and si83, among which the inhibition rates of si5, si81, si82, si3 and si8 exceeded 60%.

[0352] (2) The inhibition rates of other unmodified sequences on the PCSK9 gene were less than 40%. For example, the inhibition rates of si52 and si74 were only 0.5% and 2.2%, respectively.

[0353] (3) siRNAs with similar sequences had very different activities. For example, the inhibition rate of basic sequence 5 was 51.2% higher than that of basic sequence 4, indicating a significant improvement.

[0354] (4) Different sequences exhibited disparate effects on activity after alternate modifications. Some inhibition rates demonstrated a notable enhancement, exemplified by basic sequence 5, whose alternately modified sequence exhibited an elevated inhibition rate of 12.4% relative to its unmodified sequence. Conversely, some inhibition rates exhibited a less pronounced alteration, as observed in basic sequences 4, 22, and 52, where the inhibition rates of alternately modified and unmodified sequences exhibited minimal deviation.

### Example 4: Inhibitory Effect of Template-Modified Sequences on PCSK9 Gene

[0355] In this example, the sequences screened out in Example 3, that is, the unmodified sequences si5, si51, si81, si82, si84, si3, si8, si9, si21, si31, si73 and si83, a total of 12 sequences, were modified with templates. DV25, DV26, DV27, DV28, DV29, DV30 and DV310 are new modification templates designed in the present disclosure, and DV21 and DV22 are disclosed Advanced ESC modification templates.

### 1. Experimental Materials

### Test Samples:

[0356] Table 13 lists the sequences si5, si51, si81, si82, si84, si3, si8, si9, si21, si31, si73 and si83 in Example 3 modified with different templates (DV25, DV26, DV27, DV28, DV29, DV30, DV31, DV21 and DV22), and the corresponding alternately modified sequences P92-si5, P92-si51, P92-si81, P92-si82, P92-si84, P92-si3, P92-si8, P92-si9, P92-si21, P92-si31, P92-si73 and P92-si83 (synthesized in Example 1).

[0357] The modification principles of the modification templates of the present disclosure are as follows:

### DV25-29:

[0358] The antisense strand was modified with modifications selected from the group consisting of A, B and C:

| | Antisense strand (AS) 5′-3′ | | | | | | | | | | | |
|---|---|---|---|---|---|---|---|---|---|---|---|---|
| No. | 1 | 2 | 3 | 4 | 5 | 6 | 7 | 8 | 9 | 10 | 11 | 12 |
| A | 2′-OMe + PS | 2′-F + PS | 2′-OMe | 2′-OMe | 2′-OMe | 2′-F | 2′-OMe | 2′-OMe | 2′-OMe | 2′-OMe | 2′-OMe | 2′-OMe |
| B | 2′-OMe + PS | 2′-F + PS | 2′-F | 2′-F | 2′-OMe | 2′-F | 2′-OMe | 2′-OMe | 2′-OMe | 2′-OMe | 2′-OMe | 2′-OMe |
| C | 2′-OMe + PS | 2′-F + PS | 2′-OMe | 2′-F | 2′-F | 2′-F | 2′-OMe | 2′-OMe | 2′-OMe | 2′-OMe | 2′-OMe | 2′-OMe |

| | Antisense strand (AS) 5′-3′ | | | | | | | | | | |
|---|---|---|---|---|---|---|---|---|---|---|---|
| No. | 13 | 14 | 15 | 16 | 17 | 18 | 19 | 20 | 21 | 22 | 23 |
| A | 2′-OMe | 2′-F | 2′-OMe | 2′-F | 2′-OMe | 2′-OMe | 2′-OMe | 2′-OMe | 2′-OMe + PS | 2′-OMe + PS | 2′-OMe |
| B | 2′-OMe | 2′-F | 2′-OMe | 2′-F | 2′-OMe | 2′-OMe | 2′-OMe | 2′-OMe | 2′-OMe + PS | 2′-OMe + PS | 2′-OMe |
| C | 2′-OMe | 2′-F | 2′-OMe | 2′-F | 2′-OMe | 2′-OMe | 2′-OMe | 2′-OMe | 2′-OMe + PS | 2′-OMe + PS | 2′-OMe |

[0359] The sense strand was modified with modifications selected from the group consisting of a and b:

| | Sense strand (SS) 5′-3′ | | | | | | | | | | |
|---|---|---|---|---|---|---|---|---|---|---|---|
| No. | 1 | 2 | 3 | 4 | 5 | 6 | 7 | 8 | 9 | 10 | 11 |
| a | 2′-OMe + PS | 2′-OMe + PS | 2′-OMe | 2′-OMe | 2′-OMe | 2′-OMe | 2′-F | 2′-OMe | 2′-F | 2′-F | 2′-F |
| b | 2′-OMe + PS | 2′-OMe + PS | 2′-OMe | 2′-OMe | 2′-OMe | 2′-OMe | 2′-F | 2′-OMe | 2′-F | 2′-OMe | 2′-F |

| | Sense strand (SS) 5′-3′ | | | | | | | | | |
|---|---|---|---|---|---|---|---|---|---|---|
| No. | 12 | 13 | 14 | 15 | 16 | 17 | 18 | 19 | 20 | 21 |
| a | 2′-OMe | 2′-OMe | 2′-OMe | 2′-OMe | 2′-OMe | 2′-F | 2′-OMe | 2′-OMe | 2′-OMe | 2′-OMe |
| b | 2′-OMe | 2′-OMe | 2′-OMe | 2′-OMe | 2′-OMe | 2′-F | 2′-OMe | 2′-OMe | 2′-OMe | 2′-OMe |

[0360] In the above table, PS represents a thiophosphate backbone.

[0361] The siRNA modification template with modification A for the antisense strand and modification a for the sense strand was named DV25;

[0362] The siRNA modification template with modification B for the antisense strand and modification a for the sense strand was named DV26;

[0363] The siRNA modification template with modification C for the antisense strand and modification a for the sense strand was named DV27;

[0364] The siRNA modification template with modification B for the antisense strand and modification b for the sense strand was named DV28;

[0365] The siRNA modification template with modification C for the antisense strand and modification b for the sense strand was named DV29.

### DV30:

### Antisense Strand:

Antisense strand (AS) 5′-3′

| 1 | 2 | 3 | 4 | 5 | 6 | 7 | 8 | 9 | 10 | 11 | 12 |
|---|---|---|---|---|---|---|---|---|---|---|---|
| 2′-OMe + PS | 2′-F + PS | 2′-OMe | 2′-OMe | 2′-OMe | 2′-F | 2′-OMe | 2′-OMe | 2′-OMe | 2′-OMe | 2′-OMe | 2′-OMe |

| 13 | 14 | 15 | 16 | 17 | 18 | 19 | 20 | 21 | 22 | 23 |
|---|---|---|---|---|---|---|---|---|---|---|
| 2′-OMe | 2′-F | 2′-OMe | 2′-OMe | 2′-OMe | 2′-OMe | 2′-OMe | 2′-OMe | 2′-OMe + PS | 2′-OMe + PS | 2′-OMe |

### Sense Strand:

Sense strand (SS) 5′-3′

| 1 | 2 | 3 | 4 | 5 | 6 | 7 | 8 | 9 | 10 | 11 |
|---|---|---|---|---|---|---|---|---|---|---|
| 2′-OMe + PS | 2′-OMe + PS | 2′-OMe | 2′-OMe | 2′-OMe | 2′-OMe | 2′-F | 2′-OMe | 2′-F | 2′-F | 2′-F |

| 12 | 13 | 14 | 15 | 16 | 17 | 18 | 19 | 20 | 21 |
|---|---|---|---|---|---|---|---|---|---|
| 2′-OMe | 2′-OMe | 2′-OMe | 2′-OMe | 2′-OMe | 2′-OMe | 2′-OMe | 2′-OMe | 2′-OMe | 2′-OMe |

[0366] In the above table, PS represents a thiophosphate backbone.

### DV31:

### Antisense Strand:

Antisense strand (AS) 5′-3′

| 1 | 2 | 3 | 4 | 5 | 6 | 7 | 8 | 9 | 10 | 11 | 12 |
|---|---|---|---|---|---|---|---|---|---|---|---|
| 2′-OMe + PS | 2′-F + PS | 2′-OMe | 2′-OMe | 2′-OMe | 2′-F | 2′-OMe | 2′-OMe | 2′-OMe | 2′-OMe | 2′-OMe | 2′-OMe |

| 13 | 14 | 15 | 16 | 17 | 18 | 19 | 20 | 21 | 22 | 23 |
|---|---|---|---|---|---|---|---|---|---|---|
| 2′-OMe | 2′-F | 2′-OMe | 2′-F | 2′-OMe | 2′-OMe | 2′-OMe | 2′-OMe | 2′-OMe + PS | 2′-OMe + PS | 2′-OMe |

### Sense Strand:

Sense strand (SS) 5′-3′

| 1 | 2 | 3 | 4 | 5 | 6 | 7 | 8 | 9 | 10 | 11 |
|---|---|---|---|---|---|---|---|---|---|---|
| 2′-OMe + PS | 2′-OMe + PS | 2′-OMe | 2′-OMe | 2′-OMe | 2′-OMe | 2′-F | 2′-OMe | 2′-F | 2′-F | 2′-OMe |

| 12 | 13 | 14 | 15 | 16 | 17 | 18 | 19 | 20 | 21 |
|---|---|---|---|---|---|---|---|---|---|
| 2′-OMe | 2′-OMe | 2′-OMe | 2′-OMe | 2′-OMe | 2′-OMe | 2′-OMe | 2′-OMe | 2′-OMe | 2′-OMe |

[0367] In the above table, PS represents a thiophosphate backbone.

### DV21:

### Antisense Strand:

Antisense strand (AS) 5′-3′

| 1 | 2 | 3 | 4 | 5 | 6 | 7 | 8 | 9 | 10 | 11 | 12 |
|---|---|---|---|---|---|---|---|---|---|---|---|
| 2′-OMe + PS | 2′-F + PS | 2′-OMe | 2′-OMe | 2′-OMe | 2′-F | 2′-OMe | 2′-OMe | 2′-OMe | 2′-OMe | 2′-OMe | 2′-OMe |

| 13 | 14 | 15 | 16 | 17 | 18 | 19 | 20 | 21 | 22 | 23 |
|---|---|---|---|---|---|---|---|---|---|---|
| 2′-OMe | 2′-F | 2′-OMe | 2′-F | 2′-OMe | 2′-OMe | 2′-OMe | 2′-OMe | 2′-OMe + PS | 2′-OMe + PS | 2′-OMe |

### Sense Strand:

Sense strand (SS) 5′-3′

| 1 | 2 | 3 | 4 | 5 | 6 | 7 | 8 | 9 | 10 |
|---|---|---|---|---|---|---|---|---|---|
| 2′-OMe + PS | 2′-OMe + PS | 2′-OMe | 2′-OMe | 2′-OMe | 2′-OMe | 2′-F | 2′-OMe | 2′-F | 2′-F |

| 11 | 12 | 13 | 14 | 15 | 16 | 17 | 18 | 19 | 20 | 21 |
|---|---|---|---|---|---|---|---|---|---|---|
| 2′-F | 2′-OMe | 2′-OMe | 2′-OMe | 2′-OMe | 2′-F | 2′-F | 2′-OMe | 2′-OMe | 2′-OMe | 2′-OMe |

[0368] In the above table, PS represents a thiophosphate backbone.

### DV22:

### Antisense Strand:

Antisense strand (AS) 5′-3′

| 1 | 2 | 3 | 4 | 5 | 6 | 7 | 8 | 9 | 10 | 11 | 12 |
|---|---|---|---|---|---|---|---|---|---|---|---|
| 2′-OMe + PS | 2′-F + PS | 2′-OMe | 2′-OMe | 2′-OMe | 2′-F | 2′-OMe | 2′-OMe | 2′-OMe | 2′-OMe | 2′-OMe | 2′-OMe |

| 13 | 14 | 15 | 16 | 17 | 18 | 19 | 20 | 21 | 22 | 23 |
|---|---|---|---|---|---|---|---|---|---|---|
| 2′-OMe | 2′-F | 2′-OMe | 2′-F | 2′-OMe | 2′-OMe | 2′-OMe | 2′-OMe | 2′-OMe + PS | 2′-OMe + PS | 2′-OMe |

### Sense Strand:

Sense strand (SS) 5′-3′

| 1 | 2 | 3 | 4 | 5 | 6 | 7 | 8 | 9 | 10 | 11 |
|---|---|---|---|---|---|---|---|---|---|---|
| 2′-OMe + PS | 2′-OMe + PS | 2′-OMe | 2′-OMe | 2′-OMe | 2′-OMe | 2′-F | 2′-OMe | 2′-F | 2′-F | 2′-F |

| 12 | 13 | 14 | 15 | 16 | 17 | 18 | 19 | 20 | 21 |
|---|---|---|---|---|---|---|---|---|---|
| 2′-OMe | 2′-OMe | 2′-OMe | 2′-OMe | 2′-OMe | 2′-OMe | 2′-OMe | 2′-OMe | 2′-OMe | 2′-OMe |

[0369] In the above table, PS represents a thiophosphate backbone.

[0370] The sequences modified with each modification template are detailed in Table 13, and the synthesis methods of each sequence are the same as in Example 1.

TABLE 13
Sequences modified with different modification templates

| | | | Modified | | Modified |
|---|---|---|---|---|---|
| | | | sequence | | sequence |
| | | | SEQ ID | | SEQ ID |
| | | | NO:/ | | NO:/ |
| | | | Corres- | | Corres- |
| | | | ponding | | ponding |
| | Template- | | basic | | basic |
| Basic | modified | | sequence | | sequence |
| sequence | Sequence | | SEQ ID | | SEQ ID |
| NO. | No. | Sense strand 5′-3′ | NO: | Antisense strand 5′-3′ | NO: |
| 5 | P92-si5- | Ams-Ams-Gm-Am-Um-Cm-C | 337/1 | Ams-Ufs-Gm-Gm-Am-Af-Gm-A | 376/13 |
| | DV25 | f-Um-Gf-Cf-Af-Um-Gm-Um- | | m-Cm-Am-Um-Gm-Cm-Af-Gm- | |
| | | Cm-Um-Uf-Cm-Cm-Am-Um | | Gf-Am-Um-Cm-Um-Ums-Gms-Gm | |
| | P92-si5- | Ams-Ams-Gm-Am-Um-Cm-C | 337/1 | Ams-Ufs-Gf-Gf-Am-Af-Gm-Am- | 377/13 |
| | DV26 | f-Um-Gf-Cf-Af-Um-Gm-Um- | | Cm-Am-Um-Gm-Cm-Af-Gm-Gf- | |
| | | Cm-Um-Uf-Cm-Cm-Am-Um | | Am-Um-Cm-Um-Ums-Gms-Gm | |
| | P92-si5- | Ams-Ams-Gm-Am-Um-Cm-C | 337/1 | Ams-Ufs-Gm-Gf-Af-Af-Gm-Am- | 378/13 |
| | DV27 | f-Um-Gf-Cf-Af-Um-Gm-Um- | | Cm-Am-Um-Gm-Cm-Af-Gm-Gf- | |
| | | Cm-Um-Uf-Cm-Cm-Am-Um | | Am-Um-Cm-Um-Ums-Gms-Gm | |
| | P92-si5- | Ams-Ams-Gm-Am-Um-Cm-C | 338/1 | Ams-Ufs-Gf-Gf-Am-Af-Gm-Am- | 377/13 |
| | DV28 | f-Um-Gf-Cm-Af-Um-Gm-Um- | | Cm-Am-Um-Gm-Cm-Af-Gm-Gf- | |
| | | Cm-Um-Uf-Cm-Cm-Am-Um | | Am-Um-Cm-Um-Ums-Gms-Gm | |
| | P92-si5- | Ams-Ams-Gm-Am-Um-Cm-C | 338/1 | Ams-Ufs-Gm-Gf-Af-Af-Gm-Am- | 378/13 |
| | DV29 | f-Um-Gf-Cm-Af-Um-Gm-Um- | | Cm-Am-Um-Gm-Cm-Af-Gm-Gf- | |
| | | Cm-Um-Uf-Cm-Cm-Am-Um | | Am-Um-Cm-Um-Ums-Gms-Gm | |
| | P92-si5- | Ams-Ams-Gm-Am-Um-Cm-C | 339/1 | Ams-Ufs-Gm-Gm-Am-Af-Gm-A | 379/13 |
| | DV30 | f-Um-Gf-Cf-Af-Um-Gm-Um- | | m-Cm-Am-Um-Gm-Cm-Af-Gm- | |
| | | Cm-Um-Um-Cm-Cm-Am-Um | | Gm-Am-Um-Cm-Um-Ums-Gms- | |
| | | | | Gm | |
| | P92-si5- | Ams-Ams-Gm-Am-Um-Cm-C | 340/1 | Ams-Ufs-Gm-Gm-Am-Af-Gm-A | 376/13 |
| | DV31 | f-Um-Gf-Cf-Am-Um-Gm-Um- | | m-Cm-Am-Um-Gm-Cm-Af-Gm- | |
| | | Cm-Um-Um-Cm-Cm-Am-Um | | Gf-Am-Um-Cm-Um-Ums-Gms- | |
| | | | | Gm | |
| | P92-si5- | Ams-Ams-Gm-Am-Um-Cm-C | 341/1 | Ams-Ufs-Gm-Gm-Am-Af-Gm-A | 376/13 |
| | DV21 | f-Um-Gf-Cf-Af-Um-Gm-Um- | | m-Cm-Am-Um-Gm-Cm-Af-Gm- | |
| | | Cm-Uf-Uf-Cm-Cm-Am-Um | | Gf-Am-Um-Cm-Um-Ums-Gms- | |
| | | | | Gm | |
| | P92-si5- | Ams-Ams-Gm-Am-Um-Cm-C | 339/1 | Ams-Ufs-Gm-Gm-Am-Af-Gm-A | 376/13 |
| | DV22 | f-Um-Gf-Cf-Af-Um-Gm-Um- | | m-Cm-Am-Um-Gm-Cm-Af-Gm- | |
| | | Cm-Um-Um-Cm-Cm-Am-Um | | Gf-Am-Um-Cm-Um-Ums-Gms-Gm | |
| 51 | P92-si51- | Ums-Gms-Gm-Am-Gm-Gm-C | 342/2 | Ams-Ufs-Cm-Cm-Am-Gf-Am-A | 380/14 |
| | DV25 | f-Um-Uf-Af-Gf-Cm-Um-Um- | | m-Am-Gm-Cm-Um-Am-Af-Gm- | |
| | | Um-Cm-Uf-Gm-Gm-Am-Um | | Cf-Cm-Um-Cm-Cm-Ams-Ums-U | |
| | | | | m | |
| | P92-si51- | Ums-Gms-Gm-Am-Gm-Gm-C | 342/2 | Ams-Ufs-Cf-Cf-Am-Gf-Am-Am- | 381/14 |
| | DV26 | f-Um-Uf-Af-Gf-Cm-Um-Um- | | Am-Gm-Cm-Um-Am-Af-Gm-Cf- | |
| | | Um-Cm-Uf-Gm-Gm-Am-Um | | Cm-Um-Cm-Cm-Ams-Ums-Um | |
| | P92-si51- | Ums-Gms-Gm-Am-Gm-Gm-C | 342/2 | Ams-Ufs-Cm-Cf-Af-Gf-Am-Am- | 382/14 |
| | DV27 | f-Um-Uf-Af-Gf-Cm-Um-Um- | | Am-Gm-Cm-Um-Am-Af-Gm-Cf- | |
| | | Um-Cm-Uf-Gm-Gm-Am-Um | | Cm-Um-Cm-Cm-Ams-Ums-Um | |
| | P92-si51- | Ums-Gms-Gm-Am-Gm-Gm-C | 343/2 | Ams-Ufs-Cf-Cf-Am-Gf-Am-Am- | 381/14 |
| | DV28 | f-Um-Uf-Am-Gf-Cm-Um-Um- | | Am-Gm-Cm-Um-Am-Af-Gm-Cf- | |
| | | Um-Cm-Uf-Gm-Gm-Am-Um | | Cm-Um-Cm-Cm-Ams-Ums-Um | |
| | P92-si51- | Ums-Gms-Gm-Am-Gm-Gm-C | 343/2 | Ams-Ufs-Cm-Cf-Af-Gf-Am-Am- | 382/14 |
| | DV29 | f-Um-Uf-Am-Gf-Cm-Um-Um- | | Am-Gm-Cm-Um-Am-Af-Gm-Cf- | |
| | | Um-Cm-Uf-Gm-Gm-Am-Um | | Cm-Um-Cm-Cm-Ams-Ums-Um | |
| | P92-si51- | Ums-Gms-Gm-Am-Gm-Gm-C | 344/2 | Ams-Ufs-Cm-Cm-Am-Gf-Am-A | 383/14 |
| | DV30 | f-Um-Uf-Af-Gf-Cm-Um-Um- | | m-Am-Gm-Cm-Um-Am-Af-Gm- | |
| | | Um-Cm-Um-Gm-Gm-Am-Um | | Cm-Cm-Um-Cm-Cm-Ams-Ums- | |
| | | | | Um | |
| | P92-si51- | Ums-Gms-Gm-Am-Gm-Gm-C | 345/2 | Ams-Ufs-Cm-Cm-Am-Gf-Am-A | 380/14 |
| | DV31 | f-Um-Uf-Af-Gm-Cm-Um-Um- | | m-Am-Gm-Cm-Um-Am-Af-Gm- | |
| | | Um-Cm-Um-Gm-Gm-Am-Um | | Cf-Cm-Um-Cm-Cm-Ams-Ums-U | |
| | | | | m | |
| | P92-si51- | Ums-Gms-Gm-Am-Gm-Gm-C | 346/2 | Ams-Ufs-Cm-Cm-Am-Gf-Am-A | 380/14 |
| | DV21 | f-Um-Uf-Af-Gf-Cm-Um-Um- | | m-Am-Gm-Cm-Um-Am-Af-Gm- | |
| | | Um-Cf-Uf-Gm-Gm-Am-Um | | Cf-Cm-Um-Cm-Cm-Ams-Ums-U | |
| | | | | m | |
| | P92-si51- | Ums-Gms-Gm-Am-Gm-Gm-C | 344/2 | Ams-Ufs-Cm-Cm-Am-Gf-Am-A | 380/14 |
| | DV22 | f-Um-Uf-Af-Gf-Cm-Um-Um- | | m-Am-Gm-Cm-Um-Am-Af-Gm- | |
| | | Um-Cm-Um-Gm-Gm-Am-Um | | Cf-Cm-Um-Cm-Cm-Ams-Ums-Um | |
| 81 | P92-si81- | Cms-Ums-Um-Um-Um-Gm-U | 347/3 | Ams-Afs-Um-Am-Um-Cf-Um-U | 384/15 |
| | DV25 | f-Am-Af-Cf-Uf-Um-Gm-Am- | | m-Cm-Am-Am-Gm-Um-Uf-Am- | |
| | | Am-Gm-Af-Um-Am-Um-Um | | Cf-Am-Am-Am-Am-Gms-Cms-A | |
| | | | | m | |
| | P92-si81- | Cms-Ums-Um-Um-Um-Gm-U | 347/3 | Ams-Afs-Uf-Af-Um-Cf-Um-Um- | 385/15 |
| | DV26 | f-Am-Af-Cf-Uf-Um-Gm-Am- | | Cm-Am-Am-Gm-Um-Uf-Am-Cf- | |
| | | Am-Gm-Af-Um-Am-Um-Um | | Am-Am-Am-Am-Gms-Cms-Am | |
| | P92-si81- | Cms-Ums-Um-Um-Um-Gm-U | 347/3 | Ams-Afs-Um-Af-Uf-Cf-Um-Um- | 386/15 |
| | DV27 | f-Am-Af-Cf-Uf-Um-Gm-Am- | | Cm-Am-Am-Gm-Um-Uf-Am-Cf- | |
| | | Am-Gm-Af-Um-Am-Um-Um | | Am-Am-Am-Am-Gms-Cms-Am | |
| | P92-si81- | Cms-Ums-Um-Um-Um-Gm-U | 348/3 | Ams-Afs-Uf-Af-Um-Cf-Um-Um- | 385/15 |
| | DV28 | f-Am-Af-Cm-Uf-Um-Gm-Am- | | Cm-Am-Am-Gm-Um-Uf-Am-Cf- | |
| | | Am-Gm-Af-Um-Am-Um-Um | | Am-Am-Am-Am-Gms-Cms-Am | |
| | P92-si81- | Cms-Ums-Um-Um-Um-Gm-U | 348/3 | Ams-Afs-Um-Af-Uf-Cf-Um-Um- | 386/15 |
| | DV29 | f-Am-Af-Cm-Uf-Um-Gm-Am- | | Cm-Am-Am-Gm-Um-Uf-Am-Cf- | |
| | | Am-Gm-Af-Um-Am-Um-Um | | Am-Am-Am-Am-Gms-Cms-Am | |
| | P92-si81- | Cms-Ums-Um-Um-Um-Gm-U | 349/3 | Ams-Afs-Um-Am-Um-Cf-Um-U | 387/15 |
| | DV30 | f-Am-Af-Cf-Uf-Um-Gm-Am- | | m-Cm-Am-Am-Gm-Um-Uf-Am- | |
| | | Am-Gm-Am-Um-Am-Um-Um | | Cm-Am-Am-Am-Am-Gms-Cms- | |
| | | | | Am | |
| | P92-si81- | Cms-Ums-Um-Um-Um-Gm-U | 350/3 | Ams-Afs-Um-Am-Um-Cf-Um-U | 384/15 |
| | DV31 | f-Am-Af-Cf-Um-Um-Gm-Am- | | m-Cm-Am-Am-Gm-Um-Uf-Am- | |
| | | Am-Gm-Am-Um-Am-Um-Um | | Cf-Am-Am-Am-Am-Gms-Cms-A | |
| | | | | m | |
| | P92-si81- | Cms-Ums-Um-Um-Um-Gm-U | 351/3 | Ams-Afs-Um-Am-Um-Cf-Um-U | 384/15 |
| | DV21 | f-Am-Af-Cf-Uf-Um-Gm-Am- | | m-Cm-Am-Am-Gm-Um-Uf-Am- | |
| | | Am-Gf-Af-Um-Am-Um-Um | | Cf-Am-Am-Am-Am-Gms-Cms-A | |
| | | | | m | |
| | P92-si81- | Cms-Ums-Um-Um-Um-Gm-U | 349/3 | Ams-Afs-Um-Am-Um-Cf-Um-U | 384/15 |
| | DV22 | f-Am-Af-Cf-Uf-Um-Gm-Am- | | m-Cm-Am-Am-Gm-Um-Uf-Am- | |
| | | Am-Gm-Am-Um-Am-Um-Um | | Cf-Am-Am-Am-Am-Gms-Cms-Am | |
| 82 | P92-si82- | Gms-Ams-Am-Gm-Am-Um-A | 352/4 | Ams-Afs-Am-Cm-Cm-Cf-Am-G | 388/16 |
| | DV25 | f-Um-Uf-Uf-Af-Um-Um-Cm- | | m-Am-Am-Um-Am-Am-Af-Um- | |
| | | Um-Gm-Gf-Gm-Um-Um-Um | | Af-Um-Cm-Um-Um-Cms-Ams-A | |
| | | | | m | |
| | P92-si82- | Gms-Ams-Am-Gm-Am-Um-A | 352/4 | Ams-Afs-Af-Cf-Cm-Cf-Am-Gm- | 389/16 |
| | DV26 | f-Um-Uf-Uf-Af-Um-Um-Cm- | | Am-Am-Um-Am-Am-Af-Um-Af- | |
| | | Um-Gm-Gf-Gm-Um-Um-Um | | Um-Cm-Um-Um-Cms-Ams-Am | |
| | P92-si82- | Gms-Ams-Am-Gm-Am-Um-A | 352/4 | Ams-Afs-Am-Cf-Cf-Cf-Am-Gm- | 390/16 |
| | DV27 | f-Um-Uf-Uf-Af-Um-Um-Cm- | | Am-Am-Um-Am-Am-Af-Um-Af- | |
| | | Um-Gm-Gf-Gm-Um-Um-Um | | Um-Cm-Um-Um-Cms-Ams-Am | |
| | P92-si82- | Gms-Ams-Am-Gm-Am-Um-A | 353/4 | Ams-Afs-Af-Cf-Cm-Cf-Am-Gm- | 389/16 |
| | DV28 | f-Um-Uf-Um-Af-Um-Um-Cm- | | Am-Am-Um-Am-Am-Af-Um-Af- | |
| | | Um-Gm-Gf-Gm-Um-Um-Um | | Um-Cm-Um-Um-Cms-Ams-Am | |
| | P92-si82- | Gms-Ams-Am-Gm-Am-Um-A | 353/4 | Ams-Afs-Am-Cf-Cf-Cf-Am-Gm- | 390/16 |
| | DV29 | f-Um-Uf-Um-Af-Um-Um-Cm- | | Am-Am-Um-Am-Am-Af-Um-Af- | |
| | | Um-Gm-Gf-Gm-Um-Um-Um | | Um-Cm-Um-Um-Cms-Ams-Am | |
| | P92-si82- | Gms-Ams-Am-Gm-Am-Um-A | 354/4 | Ams-Afs-Am-Cm-Cm-Cf-Am-G | 391/16 |
| | DV30 | f-Um-Uf-Uf-Af-Um-Um-Cm- | | m-Am-Am-Um-Am-Am-Af-Um- | |
| | | Um-Gm-Gm-Gm-Um-Um-Um | | Am-Um-Cm-Um-Um-Cms-Ams- | |
| | | | | Am | |
| | P92-si82- | Gms-Ams-Am-Gm-Am-Um-A | 355/4 | Ams-Afs-Am-Cm-Cm-Cf-Am-G | 388/16 |
| | DV31 | f-Um-Uf-Uf-Am-Um-Um-Cm- | | m-Am-Am-Um-Am-Am-Af-Um- | |
| | | Um-Gm-Gm-Gm-Um-Um-Um | | Af-Um-Cm-Um-Um-Cms-Ams-A | |
| | | | | m | |
| | P92-si82- | Gms-Ams-Am-Gm-Am-Um-A | 356/4 | Ams-Afs-Am-Cm-Cm-Cf-Am-G | 388/16 |
| | DV21 | f-Um-Uf-Uf-Af-Um-Um-Cm- | | m-Am-Am-Um-Am-Am-Af-Um- | |
| | | Um-Gf-Gf-Gm-Um-Um-Um | | Af-Um-Cm-Um-Um-Cms-Ams-A | |
| | | | | m | |
| | P92-si82- | Gms-Ams-Am-Gm-Am-Um-A | 354/4 | Ams-Afs-Am-Cm-Cm-Cf-Am-G | 388/16 |
| | DV22 | f-Um-Uf-Uf-Af-Um-Um-Cm- | | m-Am-Am-Um-Am-Am-Af-Um- | |
| | | Um-Gm-Gm-Gm-Um-Um-Um | | Af-Um-Cm-Um-Um-Cms-Ams-Am | |
| 84 | P92-si84- | Gms-Ums-Um-Um-Um-Gm-U | 357/5 | Ums-Ufs-Am-Am-Um-Af-Am-A | 392/17 |
| | DV25 | f-Am-Gf-Cf-Af-Um-Um-Um- | | m-Am-Am-Um-Gm-Cm-Uf-Am- | |
| | | Um-Um-Af-Um-Um-Am-Am | | Cf-Am-Am-Am-Am-Cms-Cms-C | |
| | | | | m | |
| | P92-si84- | Gms-Ums-Um-Um-Um-Gm-U | 357/5 | Ums-Ufs-Af-Af-Um-Af-Am-Am- | 393/17 |
| | DV26 | f-Am-Gf-Cf-Af-Um-Um-Um- | | Am-Am-Um-Gm-Cm-Uf-Am-Cf- | |
| | | Um-Um-Af-Um-Um-Am-Am | | Am-Am-Am-Am-Cms-Cms-Cm | |
| | P92-si84- | Gms-Ums-Um-Um-Um-Gm-U | 357/5 | Ums-Ufs-Am-Af-Uf-Af-Am-Am- | 394/17 |
| | DV27 | f-Am-Gf-Cf-Af-Um-Um-Um- | | Am-Am-Um-Gm-Cm-Uf-Am-Cf- | |
| | | Um-Um-Af-Um-Um-Am-Am | | Am-Am-Am-Am-Cms-Cms-Cm | |
| | P92-si84- | Gms-Ums-Um-Um-Um-Gm-U | 358/5 | Ums-Ufs-Af-Af-Um-Af-Am-Am- | 393/17 |
| | DV28 | f-Am-Gf-Cm-Af-Um-Um-Um- | | Am-Am-Um-Gm-Cm-Uf-Am-Cf- | |
| | | Um-Um-Af-Um-Um-Am-Am | | Am-Am-Am-Am-Cms-Cms-Cm | |
| | P92-si84- | Gms-Ums-Um-Um-Um-Gm-U | 358/5 | Ums-Ufs-Am-Af-Uf-Af-Am-Am- | 394/17 |
| | DV29 | f-Am-Gf-Cm-Af-Um-Um-Um- | | Am-Am-Um-Gm-Cm-Uf-Am-Cf- | |
| | | Um-Um-Af-Um-Um-Am-Am | | Am-Am-Am-Am-Cms-Cms-Cm | |
| | P92-si84- | Gms-Ums-Um-Um-Um-Gm-U | 359/5 | Ums-Ufs-Am-Am-Um-Af-Am-A | 395/17 |
| | DV30 | f-Am-Gf-Cf-Af-Um-Um-Um- | | m-Am-Am-Um-Gm-Cm-Uf-Am- | |
| | | Um-Um-Am-Um-Um-Am-Am | | Cm-Am-Am-Am-Am-Cms-Cms- | |
| | | | | Cm | |
| | P92-si84- | Gms-Ums-Um-Um-Um-Gm-U | 360/5 | Ums-Ufs-Am-Am-Um-Af-Am-A | 392/17 |
| | DV31 | f-Am-Gf-Cf-Am-Um-Um-Um- | | m-Am-Am-Um-Gm-Cm-Uf-Am- | |
| | | Um-Um-Am-Um-Um-Am-Am | | Cf-Am-Am-Am-Am-Cms-Cms-C | |
| | | | | m | |
| | P92-si84- | Gms-Ums-Um-Um-Um-Gm-U | 361/5 | Ums-Ufs-Am-Am-Um-Af-Am-A | 392/17 |
| | DV21 | f-Am-Gf-Cf-Af-Um-Um-Um- | | m-Am-Am-Um-Gm-Cm-Uf-Am- | |
| | | Um-Uf-Af-Um-Um-Am-Am | | Cf-Am-Am-Am-Am-Cms-Cms-C | |
| | | | | m | |
| | P92-si84- | Gms-Ums-Um-Um-Um-Gm-U | 359/5 | Ums-Ufs-Am-Am-Um-Af-Am-A | 392/17 |
| | DV22 | f-Am-Gf-Cf-Af-Um-Um-Um- | | m-Am-Am-Um-Gm-Cm-Uf-Am- | |
| | | Um-Um-Am-Um-Um-Am-Am | | Cf-Am-Am-Am-Am-Cms-Cms-Cm | |
| 3 | P92-si3- | Cms-Ams-Cm-Cm-Am-Am-Gf- | 362/6 | Ams-Afs-Gm-Am-Cm-Af-Um-G | 396/18 |
| | DV25 | Am-Uf-Cf-Cf-Um-Gm-Cm-A | | m-Cm-Am-Gm-Gm-Am-Uf-Cm- | |
| | | m-Um-Gf-Um-Cm-Um-Um | | Uf-Um-Gm-Gm-Um-Gms-Ams- | |
| | | | | Gm | |
| | P92-si3- | Cms-Ams-Cm-Cm-Am-Am-Gf- | 362/6 | Ams-Afs-Gf-Af-Cm-Af-Um-Gm- | 397/18 |
| | DV26 | Am-Uf-Cf-Cf-Um-Gm-Cm-A | | Cm-Am-Gm-Gm-Am-Uf-Cm-Uf- | |
| | | m-Um-Gf-Um-Cm-Um-Um | | Um-Gm-Gm-Um-Gms-Ams-Gm | |
| | P92-si3- | Cms-Ams-Cm-Cm-Am-Am-Gf- | 362/6 | Ams-Afs-Gm-Af-Cf-Af-Um-Gm- | 398/18 |
| | DV27 | Am-Uf-Cf-Cf-Um-Gm-Cm-A | | Cm-Am-Gm-Gm-Am-Uf-Cm-Uf- | |
| | | m-Um-Gf-Um-Cm-Um-Um | | Um-Gm-Gm-Um-Gms-Ams-Gm | |
| | P92-si3- | Cms-Ams-Cm-Cm-Am-Am-Gf- | 363/6 | Ams-Afs-Gf-Af-Cm-Af-Um-Gm- | 397/18 |
| | DV28 | Am-Uf-Cm-Cf-Um-Gm-Cm- | | Cm-Am-Gm-Gm-Am-Uf-Cm-Uf- | |
| | | Am-Um-Gf-Um-Cm-Um-Um | | Um-Gm-Gm-Um-Gms-Ams-Gm | |
| | P92-si3- | Cms-Ams-Cm-Cm-Am-Am-Gf- | 363/6 | Ams-Afs-Gm-Af-Cf-Af-Um-Gm- | 398/18 |
| | DV29 | Am-Uf-Cm-Cf-Um-Gm-Cm- | | Cm-Am-Gm-Gm-Am-Uf-Cm-Uf- | |
| | | Am-Um-Gf-Um-Cm-Um-Um | | Um-Gm-Gm-Um-Gms-Ams-Gm | |
| 8 | P92-si8- | Cms-Ums-Cm-Am-Um-Am-G | 364/7 | Ams-Afs-Um-Am-Am-Af-Cm-U | 399/19 |
| | DV25 | f-Gm-Cf-Cf-Uf-Gm-Gm-Am- | | m-Cm-Cm-Am-Gm-Gm-Cf-Cm- | |
| | | Gm-Um-Uf-Um-Am-Um-Um | | Uf-Am-Um-Gm-Am-Gms-Gms- | |
| | | | | Gm | |
| | P92-si8- | Cms-Ums-Cm-Am-Um-Am-G | 364/7 | Ams-Afs-Uf-Af-Am-Af-Cm-Um- | 400/19 |
| | DV26 | f-Gm-Cf-Cf-Uf-Gm-Gm-Am- | | Cm-Cm-Am-Gm-Gm-Cf-Cm-Uf- | |
| | | Gm-Um-Uf-Um-Am-Um-Um | | Am-Um-Gm-Am-Gms-Gms-Gm | |
| | P92-si8- | Cms-Ums-Cm-Am-Um-Am-G | 364/7 | Ams-Afs-Um-Af-Af-Af-Cm-Um- | 401/19 |
| | DV27 | f-Gm-Cf-Cf-Uf-Gm-Gm-Am- | | Cm-Cm-Am-Gm-Gm-Cf-Cm-Uf- | |
| | | Gm-Um-Uf-Um-Am-Um-Um | | Am-Um-Gm-Am-Gms-Gms-Gm | |
| | P92-si8- | Cms-Ums-Cm-Am-Um-Am-G | 365/7 | Ams-Afs-Uf-Af-Am-Af-Cm-Um- | 400/19 |
| | DV28 | f-Gm-Cf-Cm-Uf-Gm-Gm-Am- | | Cm-Cm-Am-Gm-Gm-Cf-Cm-Uf- | |
| | | Gm-Um-Uf-Um-Am-Um-Um | | Am-Um-Gm-Am-Gms-Gms-Gm | |
| | P92-si8- | Cms-Ums-Cm-Am-Um-Am-G | 365/7 | Ams-Afs-Um-Af-Af-Af-Cm-Um- | 401/19 |
| | DV29 | f-Gm-Cf-Cm-Uf-Gm-Gm-Am- | | Cm-Cm-Am-Gm-Gm-Cf-Cm-Uf- | |
| | | Gm-Um-Uf-Um-Am-Um-Um | | Am-Um-Gm-Am-Gms-Gms-Gm | |
| 9 | P92-si9- | Gms-Gms-Cm-Cm-Um-Gm-G | 366/8 | Ums-Ufs-Um-Cm-Cm-Gf-Am-A | 402/20 |
| | DV25 | f-Am-Gf-Uf-Uf-Um-Am-Um- | | m-Um-Am-Am-Am-Cm-Uf-Cm- | |
| | | Um-Cm-Gf-Gm-Am-Am-Am | | Cf-Am-Gm-Gm-Cm-Cms-Ums-A | |
| | | | | m | |
| | P92-si9- | Gms-Gms-Cm-Cm-Um-Gm-G | 366/8 | Ums-Ufs-Uf-Cf-Cm-Gf-Am-Am- | 403/20 |
| | DV26 | f-Am-Gf-Uf-Uf-Um-Am-Um- | | Um-Am-Am-Am-Cm-Uf-Cm-Cf- | |
| | | Um-Cm-Gf-Gm-Am-Am-Am | | Am-Gm-Gm-Cm-Cms-Ums-Am | |
| | P92-si9- | Gms-Gms-Cm-Cm-Um-Gm-G | 366/8 | Ums-Ufs-Um-Cf-Cf-Gf-Am-Am- | 404/20 |
| | DV27 | f-Am-Gf-Uf-Uf-Um-Am-Um- | | Um-Am-Am-Am-Cm-Uf-Cm-Cf- | |
| | | Um-Cm-Gf-Gm-Am-Am-Am | | Am-Gm-Gm-Cm-Cms-Ums-Am | |
| | P92-si9- | Gms-Gms-Cm-Cm-Um-Gm-G | 367/8 | Ums-Ufs-Uf-Cf-Cm-Gf-Am-Am- | 403/20 |
| | DV28 | f-Am-Gf-Um-Uf-Um-Am-Um- | | Um-Am-Am-Am-Cm-Uf-Cm-Cf- | |
| | | Um-Cm-Gf-Gm-Am-Am-Am | | Am-Gm-Gm-Cm-Cms-Ums-Am | |
| | P92-si9- | Gms-Gms-Cm-Cm-Um-Gm-G | 367/8 | Ums-Ufs-Um-Cf-Cf-Gf-Am-Am- | 404/20 |
| | DV29 | f-Am-Gf-Um-Uf-Um-Am-Um- | | Um-Am-Am-Am-Cm-Uf-Cm-Cf- | |
| | | Um-Cm-Gf-Gm-Am-Am-Am | | Am-Gm-Gm-Cm-Cms-Ums-Am | |
| 21 | P92-si21- | Cms-Ams-Gm-Cm-Am-Cm-Cf- | 368/9 | Ums-Gfs-Um-Gm-Am-Cf-Am-C | 405/21 |
| | DV25 | Um-Gf-Cf-Uf-Um-Um-Gm-U | | m-Am-Am-Am-Gm-Cm-Af-Gm- | |
| | | m-Gm-Uf-Cm-Am-Cm-Am | | Gf-Um-Gm-Cm-Um-Gms-Cms-A | |
| | | | | m | |
| | P92-si21- | Cms-Ams-Gm-Cm-Am-Cm-Cf- | 368/9 | Ums-Gfs-Uf-Gf-Am-Cf-Am-Cm- | 406/21 |
| | DV26 | Um-Gf-Cf-Uf-Um-Um-Gm-U | | Am-Am-Am-Gm-Cm-Af-Gm-Gf- | |
| | | m-Gm-Uf-Cm-Am-Cm-Am | | Um-Gm-Cm-Um-Gms-Cms-Am | |
| | P92-si21- | Cms-Ams-Gm-Cm-Am-Cm-Cf- | 368/9 | Ums-Gfs-Um-Gf-Af-Cf-Am-Cm- | 407/21 |
| | DV27 | Um-Gf-Cf-Uf-Um-Um-Gm-U | | Am-Am-Am-Gm-Cm-Af-Gm-Gf- | |
| | | m-Gm-Uf-Cm-Am-Cm-Am | | Um-Gm-Cm-Um-Gms-Cms-Am | |
| | P92-si21- | Cms-Ams-Gm-Cm-Am-Cm-Cf- | 369/9 | Ums-Gfs-Uf-Gf-Am-Cf-Am-Cm- | 406/21 |
| | DV28 | Um-Gf-Cm-Uf-Um-Um-Gm- | | Am-Am-Am-Gm-Cm-Af-Gm-Gf- | |
| | | Um-Gm-Uf-Cm-Am-Cm-Am | | Um-Gm-Cm-Um-Gms-Cms-Am | |
| | P92-si21- | Cms-Ams-Gm-Cm-Am-Cm-Cf- | 369/9 | Ums-Gfs-Um-Gf-Af-Cf-Am-Cm- | 407/21 |
| | DV29 | Um-Gf-Cm-Uf-Um-Um-Gm- | | Am-Am-Am-Gm-Cm-Af-Gm-Gf- | |
| | | Um-Gm-Uf-Cm-Am-Cm-Am | | Um-Gm-Cm-Um-Gms-Cms-Am | |
| 31 | P92-si31- | Gms-Gms-Um-Cm-Um-Gm-G | 370/10 | Cms-Ufs-Um-Gm-Am-Cf-Um-U | 408/22 |
| | DV25 | f-Am-Af-Uf-Gf-Cm-Am-Am- | | m-Um-Gm-Cm-Am-Um-Uf-Cm- | |
| | | Am-Gm-Uf-Cm-Am-Am-Gm | | Cf-Am-Gm-Am-Cm-Cms-Ums-G | |
| | | | | m | |
| | P92-si31- | Gms-Gms-Um-Cm-Um-Gm-G | 370/10 | Cms-Ufs-Uf-Gf-Am-Cf-Um-Um- | 409/22 |
| | DV26 | f-Am-Af-Uf-Gf-Cm-Am-Am- | | Um-Gm-Cm-Am-Um-Uf-Cm-Cf- | |
| | | Am-Gm-Uf-Cm-Am-Am-Gm | | Am-Gm-Am-Cm-Cms-Ums-Gm | |
| | P92-si31- | Gms-Gms-Um-Cm-Um-Gm-G | 370/10 | Cms-Ufs-Um-Gf-Af-Cf-Um-Um- | 410/22 |
| | DV27 | f-Am-Af-Uf-Gf-Cm-Am-Am- | | Um-Gm-Cm-Am-Um-Uf-Cm-Cf- | |
| | | Am-Gm-Uf-Cm-Am-Am-Gm | | Am-Gm-Am-Cm-Cms-Ums-Gm | |
| | P92-si31- | Gms-Gms-Um-Cm-Um-Gm-G | 371/10 | Cms-Ufs-Uf-Gf-Am-Cf-Um-Um- | 409/22 |
| | DV28 | f-Am-Af-Um-Gf-Cm-Am-Am- | | Um-Gm-Cm-Am-Um-Uf-Cm-Cf- | |
| | | Am-Gm-Uf-Cm-Am-Am-Gm | | Am-Gm-Am-Cm-Cms-Ums-Gm | |
| | P92-si31- | Gms-Gms-Um-Cm-Um-Gm-G | 371/10 | Cms-Ufs-Um-Gf-Af-Cf-Um-Um- | 410/22 |
| | DV29 | f-Am-Af-Um-Gf-Cm-Am-Am- | | Um-Gm-Cm-Am-Um-Uf-Cm-Cf- | |
| | | Am-Gm-Uf-Cm-Am-Am-Gm | | Am-Gm-Am-Cm-Cms-Ums-Gm | |
| 73 | P92-si73- | Gms-Cms-Gm-Gm-Am-Gm-A | 372/11 | Ams-Ufs-Gm-Cm-Cm-Uf-Um-A | 411/23 |
| | DV25 | f-Um-Gf-Cf-Uf-Um-Cm-Um- | | m-Gm-Am-Am-Gm-Cm-Af-Um- | |
| | | Am-Am-Gf-Gm-Cm-Am-Um | | Cf-Um-Cm-Cm-Gm-Cms-Cms-A | |
| | | | | m | |
| | P92-si73- | Gms-Cms-Gm-Gm-Am-Gm-A | 372/11 | Ams-Ufs-Gf-Cf-Cm-Uf-Um-Am- | 412/23 |
| | DV26 | f-Um-Gf-Cf-Uf-Um-Cm-Um- | | Gm-Am-Am-Gm-Cm-Af-Um-Cf- | |
| | | Am-Am-Gf-Gm-Cm-Am-Um | | Um-Cm-Cm-Gm-Cms-Cms-Am | |
| | P92-si73- | Gms-Cms-Gm-Gm-Am-Gm-A | 372/11 | Ams-Ufs-Gm-Cf-Cf-Uf-Um-Am- | 413/23 |
| | DV27 | f-Um-Gf-Cf-Uf-Um-Cm-Um- | | Gm-Am-Am-Gm-Cm-Af-Um-Cf- | |
| | | Am-Am-Gf-Gm-Cm-Am-Um | | Um-Cm-Cm-Gm-Cms-Cms-Am | |
| | P92-si73- | Gms-Cms-Gm-Gm-Am-Gm-A | 373/11 | Ams-Ufs-Gf-Cf-Cm-Uf-Um-Am- | 412/23 |
| | DV28 | f-Um-Gf-Cm-Uf-Um-Cm-Um- | | Gm-Am-Am-Gm-Cm-Af-Um-Cf- | |
| | | Am-Am-Gf-Gm-Cm-Am-Um | | Um-Cm-Cm-Gm-Cms-Cms-Am | |
| | P92-si73- | Gms-Cms-Gm-Gm-Am-Gm-A | 373/11 | Ams-Ufs-Gm-Cf-Cf-Uf-Um-Am- | 413/23 |
| | DV29 | f-Um-Gf-Cm-Uf-Um-Cm-Um- | | Gm-Am-Am-Gm-Cm-Af-Um-Cf- | |
| | | Am-Am-Gf-Gm-Cm-Am-Um | | Um-Cm-Cm-Gm-Cms-Cms-Am | |
| 83 | P92-si83- | Gms-Gms-Gm-Um-Um-Um-U | 374/12 | Ams-Afs-Um-Am-Am-Af-Am-A | 414/24 |
| | DV25 | f-Gm-Uf-Af-Gf-Cm-Am-Um- | | m-Um-Gm-Cm-Um-Am-Cf-Am- | |
| | | Um-Um-Uf-Um-Am-Um-Um | | Af-Am-Am-Cm-Cm-Cms-Ams-G | |
| | | | | m | |
| | P92-si83- | Gms-Gms-Gm-Um-Um-Um-U | 374/12 | Ams-Afs-Uf-Af-Am-Af-Am-Am- | 415/24 |
| | DV26 | f-Gm-Uf-Af-Gf-Cm-Am-Um- | | Um-Gm-Cm-Um-Am-Cf-Am-Af- | |
| | | Um-Um-Uf-Um-Am-Um-Um | | Am-Am-Cm-Cm-Cms-Ams-Gm | |
| | P92-si83- | Gms-Gms-Gm-Um-Um-Um-U | 374/12 | Ams-Afs-Um-Af-Af-Af-Am-Am- | 416/24 |
| | DV27 | f-Gm-Uf-Af-Gf-Cm-Am-Um- | | Um-Gm-Cm-Um-Am-Cf-Am-Af- | |
| | | Um-Um-Uf-Um-Am-Um-Um | | Am-Am-Cm-Cm-Cms-Ams-Gm | |
| | P92-si83- | Gms-Gms-Gm-Um-Um-Um-U | 375/12 | Ams-Afs-Uf-Af-Am-Af-Am-Am- | 415/24 |
| | DV28 | f-Gm-Uf-Am-Gf-Cm-Am-Um- | | Um-Gm-Cm-Um-Am-Cf-Am-Af- | |
| | | Um-Um-Uf-Um-Am-Um-Um | | Am-Am-Cm-Cm-Cms-Ams-Gm | |
| | P92-si83- | Gms-Gms-Gm-Um-Um-Um-U | 375/12 | Ams-Afs-Um-Af-Af-Af-Am-Am- | 416/24 |
| | DV29 | f-Gm-Uf-Am-Gf-Cm-Am-Um- | | Um-Gm-Cm-Um-Am-Cf-Am-Af- | |
| | | Um-Um-Uf-Um-Am-Um-Um | | Am-Am-Cm-Cm-Cms-Ams-Gm | |

[0371] Cell type: HEP3B cell line cells

[0372] Drug solvent: DNase/RNase-Free Water, Gibco DMEM (purchased from Thermo Fisher; catalog No.: 10569010)

### 2. Experimental Methods

[0373] The inhibition of the mRNA expression of the PCSK9 gene by the test samples was detected in the HEP3B cell line using qRT-PCR. Hep3B cells were provided by Shanghai WuXi AppTec New Drug Development Co., Ltd. (ATCC-tings-1618164).

### 2.1 Cell Culture

[0374] The subcultured HEP3B cell line cells were used. The logarithmically growing cells were cultured with 10% fetal bovine serum RPMI 1640 medium (supplemented with 100 μL/mL of penicillin and streptomycin) in a cell culture incubator at 37° C. containing 5% CO₂, and the medium was changed once a day. The cells were digested with 0.25% trypsin and centrifuged at 1000 r/min for 5 min. The supernatant was discarded, and fresh culture medium was added for subculture.

### 2.2 Cell Transfection

[0375] Preparation of a transfection mixture: Lipofectamine RNAiMAX and Opti-MEM were mixed in a ratio of 1.5:98.5 and then mixed well by vortex.

[0376] Preparation of transfection reagent: 60 μL of siRNA solution diluted in Opti-MEM was added to 60 μL of the transfection mixture at a ratio of 1:1 (v/v), mixed well by vortex and left to stand at room temperature for 15 min to obtain lipid nanoparticles (LNPs), 12.5 μL of which was used for detection of encapsulation efficiency.

[0377] Transfection reagent for blank control group: 60 μL of the prepared transfection mixture was added to 60 μL of Opti-MEM, mixed well by vortex and left to stand at room temperature for 15 min.

[0378] The prepared transfection reagent was added to a 24-well cell culture plate (100 μL per well) to a final siRNA concentration of 0.05 nM per well. 500 μL of cell suspension (6×10⁴ cells per ml) was added and mixed well using the cross method. The plate was placed in a 37° C., 5% CO₂ cell culture incubator for 40 h.

2.3 PCSK9 mRNA Detection

[0379] The steps were the same as those in “2.3 PCSK9 mRNA detection” in Example 2.

### 2.4 Data Processing

[0380] The PCSK9 mRNA expression rate (%) was calculated as follows:

Expression rate=(PCSK9 mRNA expression level/PCSK9 mRNA expression level in blank control group)×100%;

PCSK9 gene expression inhibition rate=1−expression rate (%).

### 2.5 EC50 Experiment

[0381] In this experiment, the siRNA concentration for each sequence in the EC50 experiment started from 0.2 nM and subjected to 4-fold dilution to obtain a total of 8 concentration points (0.2 nM, 0.05 nM, 0.0125 nM, 3.13 pM, 0.78 pM, 0.2 pM, 0.05 pM and 0.01 pM). The inhibition rate of each sequence at each concentration was measured and plotted to calculate the EC50 concentration of each sequence.

### 3. Experimental Results

[0382] After three repeated experiments, the inhibition rates against the PCSK9 gene by each modified sequence in Hep3B cells are shown in Tables 14-25.

[0383] The activity detection experiment results show that after modified with the modification template DV25-29 designed in the present disclosure, 12 candidate sequences (unmodified sequences si5, si51, si81, si82, si84, si3, si8, si9, si21, si31, si73 and si83) exhibited a significant inhibitory effect on the PCSK9 gene, with inhibition rates above 70%, among which the inhibition rates of P92-si81-DV26, P92-si82-DV27 and P92-si82-DV29 reached 89.3%, 89.3% and 89.1%, respectively.

[0384] After the modification with the modification templates DV25-29 of the present disclosure, the inhibition rate against the PCSK9 gene expression was significantly improved compared with that of the alternately modified sequences. For example, sequence P92-si51-DV27 obtained by modifying basic sequence 51 with the template DV27 increased the inhibition rate by 29.1% compared to the alternately modified sequence, and sequence P92-si81-DV26 obtained by modifying basic sequence 81 with the template DV26 increased the inhibition rate by 26.9% compared to the alternately modified sequence.

[0385] Moreover, the activity varied greatly after the same siRNA sequence was modified with different modification templates. For example, the inhibition rate of the sequence of basic sequence 51 modified with modification template DV27 of the present disclosure was increased by 22.8% compared with that of the sequence modified with modification template DV31 of the present disclosure, and increased by 21.3% compared with that of the sequence modified with the disclosed Advanced ESC template DV21.

[0386] EC50 experiments show that the EC50 values of sequences modified with the modification templates designed in the present disclosure were between 0.0001 and 0.005 nM. For example, the EC50 values of P92-si81-DV27, P92-si84-DV26, and P92-si82-DV27 were 0.0003 nM, 0.0004 nM, and 0.0006 nM, respectively. These sequences can effectively inhibit the expression of the PCSK9 gene at low concentrations.

### (i) Inhibitory Effect of Template-Modified Basic Sequences on the PCSK9 Gene

### (1) Basic Sequence 5

TABLE 14
Inhibition rate against PCSK9 gene by
template-modified basic sequence 5

| | | | Inhibition | |
|---|---|---|---|---|
| | | Inhibition | rate (%) of | |
| | | rate (%) of | corresponding | |
| Basic | Template- | template- | alternately- | |
| sequence | modified | modified | modified | Increase |
| NO. | sequence No. | sequence | sequence | (%) |
| 5 | P92-si5-DV25 | 81.8 | 65.4 | 16.4 |
| | P92-si5-DV26 | 84.9 | 65.4 | 19.5 |
| | P92-si5-DV27 | 82.0 | 65.4 | 16.6 |
| | P92-si5-DV28 | 80.1 | 65.4 | 14.7 |
| | P92-si5-DV29 | 80.7 | 65.4 | 15.3 |
| | P92-si5-DV30 | 65.3 | 65.4 | −0.1 |
| | P92-si5-DV31 | 62.4 | 65.4 | −3.0 |
| | P92-si5-DV21 | 68.2 | 65.4 | 2.8 |
| | P92-si5-DV22 | 69.1 | 65.4 | 3.7 |

### I. DV25-29 Templates of the Present Disclosure

[0387] Basic sequence 5 modified with the modification templates DV25-29 designed by the present disclosure exhibited an inhibition rate against the PCSK9 gene exceeding 80%. Compared with the alternate modification with 2′-position methoxy and 2′-position fluorine, the inhibition rate against the PCSK9 gene increased significantly. For example, after modification with templates DV26 and DV27, the inhibition rates of P92-si5-DV26 and P92-si5-DV27 increased by 19.5% and 16.6% respectively (FIG. 7).

### II. Other Modification Templates of the Present Disclosure

[0388] P92-si5-DV30 and P92-si5-DV31 obtained by modifying basic sequence 5 with templates DV30 and DV31 had inhibition rates against the PCSK9 gene of 65.3% and 62.4% respectively, which were 0.1% and 3.0% lower than the corresponding alternately modified sequences, respectively.

[0389] P92-si5-DV26 and P92-si5-DV27 modified with templates DV26 and DV27 of the present disclosure increased the inhibition rate by 19.6% and 16.7% compared with P92-si5-DV30, and increased by 22.5% and 19.6% compared with P92-si5-DV31, indicating a significant improvement.

III. Advanced ESC Templates DV21 (Fluorinated Sites: Positions 2, 6, 14 and 16 on the Antisense Strand and Positions 7, 9, 10, 11, 16 and 17 on the Sense Strand) and DV22 (Fluorinated Sites: Positions 2, 6, 14 and 16 on the Antisense Strand and Positions 7, 9, 10 and 11 on the Sense Strand) Disclosed in the Prior Art

[0390] P92-si5-DV21 and P92-si5-DV22 obtained by modifying basic sequence 5 with templates DV21 and DV22 had inhibition rates against the PCSK9 gene of 68.2% and 69.1% respectively, which were 2.8% and 3.7% higher than the corresponding alternately modified sequences, respectively.

[0391] P92-si5-DV26 and P92-si5-DV27 modified with templates DV26 and DV27 of the present disclosure increased the inhibition rate by 16.7% and 13.8% compared with P92-si5-DV21, and increased by 15.8% and 12.9% compared with P92-si5-DV22, indicating a significant improvement.

[0392] It can be concluded that:

[0393] 1) After modification on basic sequence 5 with the modification templates DV25-29 of the present disclosure, the inhibition effect on the PCSK9 gene was significantly improved compared with the alternately modified sequences. For example, the inhibition rate of the basic sequence 5 modified with DV26 was 19.5% higher than that of the alternately modified sequence.

[0394] 2) The activity varied greatly after the same siRNA sequence was modified with different modification templates. For example, the inhibition rate of the sequences obtained by modifying basic sequence 5 with modification templates DV26 and DV27 of the present disclosure can be increased by up to 22.5% compared with the sequences modified with modification templates DV30 and DV31 of the present disclosure, indicating a significant improvement; and can be increased by up to 16.7% compared with the sequences modified with the disclosed Advanced ESC templates DV21 and DV22, indicating a significant improvement.

[0395] 3) The activity of siRNA sequences modified with different templates varied greatly, up to 20%. It can be seen that it is uncertain which template modification can be used in siRNA sequences to achieve high activity.

### (2) Basic Sequence 51

TABLE 15
Inhibition rate against PCSK9 gene by
template-modified basic sequence 51

| | | | Inhibition | |
|---|---|---|---|---|
| | | Inhibition | rate (%) of | |
| | | rate (%) of | corresponding | |
| Basic | Template- | template- | alternately- | |
| sequence | modified | modified | modified | Increase |
| NO. | sequence No. | sequence | sequence | (%) |
| 51 | P92-si51-DV25 | 83.1 | 56.5 | 26.6 |
| | P92-si51-DV26 | 84.2 | 56.5 | 27.7 |
| | P92-si51-DV27 | 85.6 | 56.5 | 29.1 |
| | P92-si51-DV28 | 76.8 | 56.5 | 20.3 |
| | P92-si51-DV29 | 78.9 | 56.5 | 22.4 |
| | P92-si51-DV30 | 63.5 | 56.5 | 7.0 |
| | P92-si51-DV31 | 62.8 | 56.5 | 6.3 |
| | P92-si51-DV21 | 64.3 | 56.5 | 7.8 |
| | P92-si51-DV22 | 65.1 | 56.5 | 8.6 |

### I. DV25-29 Templates of the Present Disclosure

[0396] Basic sequence 51 modified with the modification templates DV25-29 designed by the present disclosure exhibited an inhibition rate against the PCSK9 gene exceeding 75%. Compared with the alternate modification with 2′-position methoxy and 2′-position fluorine, the inhibition rate against the PCSK9 gene increased significantly. For example, after modification with templates DV26 and DV27, the inhibition rates of P92-si51-DV26 and P92-si51-DV27 increased by 27.7% and 29.1% respectively.

### II. Other Modification Templates of the Present Disclosure

[0397] P92-si51-DV30 and P92-si51-DV31 obtained by modifying basic sequence 51 with templates DV30 and DV31 had inhibition rates against the PCSK9 gene of 63.5% and 62.8% respectively, which were only 7.0% and 6.3% higher than the corresponding alternately modified sequences, respectively.

[0398] P92-si51-DV26 and P92-si51-DV27 modified with templates DV26 and DV27 of the present disclosure increased the inhibition rate by 20.7% and 22.1% compared with

[0399] P92-si51-DV30, and increased by 21.4% and 22.8% compared with P92-si51-DV31, indicating a significant improvement.

III. Advanced ESC Templates DV21 (Fluorinated Sites: Positions 2, 6, 14 and 16 on the Antisense Strand and Positions 7, 9, 10, 11, 16 and 17 on the Sense Strand) and DV22 (Fluorinated Sites: Positions 2, 6, 14 and 16 on the Antisense Strand and Positions 7, 9, 10 and 11 on the Sense Strand) Disclosed in the Prior Art

[0400] P92-si51-DV21 and P92-si51-DV22 obtained by modifying basic sequence 51 with templates DV21 and DV22 had inhibition rates against the PCSK9 gene of 64.3% and 65.1% respectively, which were 7.8% and 8.6% higher than the corresponding alternately modified sequences, respectively.

[0401] P92-si51-DV26 and P92-si51-DV27 modified with templates DV26 and DV27 of the present disclosure increased the inhibition rate by 19.9% and 21.3% compared with P92-si51-DV21, and increased by 19.1% and 20.5% compared with P92-si5-DV22, indicating a significant improvement.

[0402] It can be concluded that:

[0403] 1) After modification on basic sequence 51 using the modification templates DV25-29 of the present disclosure, the inhibition effect on the PCSK9 gene was significantly improved compared with the alternately modified sequences. For example, the inhibition rate of the basic sequence 51 modified with DV27 was 29.1% higher than that of the alternately modified sequence.

[0404] 2) The activity varied greatly after the same siRNA sequence was modified with different modification templates. For example, the inhibition rate of the sequences obtained by modifying basic sequence 51 with modification templates DV26 and DV27 of the present disclosure can be increased by up to 22.8% compared with the sequences modified with modification templates DV30 and DV31 of the present disclosure, indicating a significant improvement; and can be increased by up to 21.3% compared with the sequences modified with the disclosed Advanced ESC templates DV21 and DV22, indicating a significant improvement.

[0405] 3) The activity of siRNA sequences modified with different templates varied greatly, up to 20% difference. It can be seen that it is uncertain which template modification can be used in siRNA sequences to achieve high activity.

### (3) Basic Sequence 81

TABLE 16
Inhibition rate against PCSK9 gene by
template-modified basic sequence 81

| | | | Inhibition | |
|---|---|---|---|---|
| | | Inhibition | rate (%) of | |
| | | rate (%) of | corresponding | |
| Basic | Template- | template- | alternately- | |
| sequence | modified | modified | modified | Increase |
| NO. | sequence No. | sequence | sequence | (%) |
| 81 | P92-si81-DV25 | 85.9 | 62.4 | 23.5 |
| | P92-si81-DV26 | 89.3 | 62.4 | 26.9 |
| | P92-si81-DV27 | 87.1 | 62.4 | 24.7 |
| | P92-si81-DV28 | 84.8 | 62.4 | 22.4 |
| | P92-si81-DV29 | 85.6 | 62.4 | 23.2 |
| | P92-si81-DV30 | 71.6 | 62.4 | 9.2 |
| | P92-si81-DV31 | 73.5 | 62.4 | 11.1 |
| | P92-si81-DV21 | 78.3 | 62.4 | 15.9 |
| | P92-si81-DV22 | 75.1 | 62.4 | 12.7 |

### I. DV25-29 Templates of the Present Disclosure

[0406] Basic sequence 81 modified with the modification templates DV25-29 designed by the present disclosure exhibited an inhibition rate against the PCSK9 gene exceeding 80%. Compared with the alternate modification with 2′-position methoxy and 2′-position fluorine, the inhibition rate against the PCSK9 gene increased significantly. For example, after modification with templates DV26 and DV27, the inhibition rates of P92-si81-DV26 and P92-si81-DV27 increased by 26.9% and 24.7% respectively.

### II. Other Modification Templates of the Present Disclosure

[0407] P92-si81-DV30 and P92-si81-DV31 obtained by modifying basic sequence 81 with templates DV30 and DV31 had inhibition rates against the PCSK9 gene of 71.6% and 73.5% respectively, which were 9.2% and 11.1% higher than that of the corresponding alternately modified sequences, respectively.

[0408] P92-si81-DV26 and P92-si81-DV27 modified with templates DV26 and DV27 of the present disclosure increased the inhibition rate by 17.7% and 15.5% compared with P92-si81-DV27, and increased by 15.8% and 13.6% compared with P92-si81-DV31, indicating a significant improvement.

III. Advanced ESC Templates DV21 (Fluorinated Sites: Positions 2, 6, 14 and 16 on the Antisense Strand and Positions 7, 9, 10, 11, 16 and 17 on the Sense Strand) and DV22 (Fluorinated Sites: Positions 2, 6, 14 and 16 on the Antisense Strand and Positions 7, 9, 10 and 11 on the Sense Strand) Disclosed in the Prior Art

[0409] P92-si81-DV21 and P92-si81-DV22 obtained by modifying basic sequence 81 with templates DV21 and DV22 had inhibition rates against the PCSK9 gene of 78.3% and 75.1% respectively, which were 15.9% and 12.7% higher than that of the corresponding alternately modified sequences, respectively.

[0410] P92-si81-DV26 and P92-si81-DV27 modified with templates DV26 and DV27 of the present disclosure increased the inhibition rate by 11.0% and 8.8% compared with P92-si81-DV21, and increased by 14.2% and 12.0% compared with P92-si81-DV22, indicating a significant improvement.

[0411] It can be concluded that:

[0412] 1) After modification on basic sequence 81 with the modification templates DV25-29 of the present disclosure, the inhibition effect on the PCSK9 gene was significantly improved compared with the alternately modified sequences. For example, the inhibition rate of the basic sequence 81 modified with DV26 was 26.9% higher than that of the alternately modified sequence.

[0413] 2) The activity varied greatly after the same siRNA sequence was modified with different modification templates. For example, the inhibition rate of the sequences obtained by modifying basic sequence 81 with modification templates DV26 and DV27 of the present disclosure can be increased by up to 17.7% compared with the sequences modified with modification templates DV30 and DV31 of the present disclosure, indicating a significant improvement; and can be increased by up to 14.2% compared with the sequences modified with the disclosed Advanced ESC templates DV21 and DV22, indicating a significant improvement.

[0414] 3) The activity of siRNA sequences modified with different templates varied greatly, up to 20% difference. It can be seen that it is uncertain which template modification can be used in siRNA sequences to achieve high activity.

### (4) Basic Sequence 82

TABLE 17
Inhibition rate against PCSK9 gene by
template-modified basic sequence 82

| | | | Inhibition | |
|---|---|---|---|---|
| | | Inhibition | rate (%) of | |
| | | rate (%) of | corresponding | |
| Basic | Template- | template- | alternately- | |
| sequence | modified | modified | modified | Increase |
| NO. | sequence No. | sequence | sequence | (%) |
| 82 | P92-si82-DV25 | 83.8 | 69.7 | 14.1 |
| | P92-si82-DV26 | 84.4 | 69.7 | 14.7 |
| | P92-si82-DV27 | 89.3 | 69.7 | 19.6 |
| | P92-si82-DV28 | 86.7 | 69.7 | 17.0 |
| | P92-si82-DV29 | 89.1 | 69.7 | 19.4 |
| | P92-si82-DV30 | 70.2 | 69.7 | 0.5 |
| | P92-si82-DV31 | 69.7 | 69.7 | 0.0 |
| | P92-si82-DV21 | 76.5 | 69.7 | 6.8 |
| | P92-si82-DV22 | 75.4 | 69.7 | 5.7 |

### I. DV25-29 Templates of the Present Disclosure

[0415] Basic sequence 82 modified with the modification templates DV25-29 designed by the present disclosure exhibited an inhibition rate against the PCSK9 gene exceeding 80%. Compared with the alternate modification with 2′-position methoxy and 2′-position fluorine, the inhibition rate against the PCSK9 gene increased significantly. For example, after modification with templates DV27 and DV29, the inhibition rates of P92-si82-DV27 and P92-si82-DV29 increased by 19.6% and 19.4% respectively.

### II. Other Modification Templates of the Present Disclosure

[0416] P92-si82-DV30 and P92-si82-DV31 obtained by modifying basic sequence 82 with templates DV30 and DV31 had inhibition rates against the PCSK9 gene of 70.2% and 69.7% respectively, which were comparable to the corresponding alternately modified sequences.

[0417] P92-si82-DV27 and P92-si82-DV29 modified with templates DV27 and DV29 of the present disclosure increased the inhibition rate by 19.1% and 18.9% compared with P92-si82-DV27, and increased by 19.6% and 19.4% compared with P92-si82-DV31, indicating a significant improvement.

III. Advanced ESC Templates DV21 (Fluorinated Sites: Positions 2, 6, 14 and 16 on the Antisense Strand and Positions 7, 9, 10, 11, 16 and 17 on the Sense Strand) and DV22 (Fluorinated Sites: Positions 2, 6, 14 and 16 on the Antisense Strand and Positions 7, 9, 10 and 11 on the Sense Strand) Disclosed in the Prior Art

[0418] P92-si82-DV21 and P92-si82-DV22 obtained by modifying basic sequence 82 with templates DV21 and DV22 had inhibition rates against the PCSK9 gene of 76.5% and 75.4% respectively, which were 6.8% and 5.7% higher than the corresponding alternately modified sequences, respectively.

[0419] P92-si82-DV27 and P92-si82-DV29 modified with templates DV27 and DV29 of the present disclosure increased the inhibition rate by 12.8% and 12.6% compared with P92-si82-DV21, and increased by 13.9% and 13.7% compared with P92-si82-DV22, indicating a significant improvement.

[0420] It can be concluded that:

[0421] 1) After modification on basic sequence 82 using the modification templates DV25-29 of the present disclosure, the inhibition effect on the PCSK9 gene was significantly improved compared with the alternately modified sequences. For example, the inhibition rate of the basic sequence 82 modified with DV27 was 19.6% higher than that of the alternately modified sequence.

[0422] 2) The activity varied greatly after the same siRNA sequence was modified with different modification templates. For example, the inhibition rate of the sequences obtained by modifying basic sequence 82 with modification templates DV27 and DV29 of the present disclosure can be increased by up to 19.6% compared with the sequences modified with modification templates DV30 and DV31 of the present disclosure, indicating a significant improvement; and can be increased by up to 13.9% compared with the sequences modified with the disclosed Advanced ESC templates DV21 and DV22, indicating a significant improvement.

[0423] 3) The activity of siRNA sequences modified with different templates varied greatly, up to 20% difference. It can be seen that it is uncertain which template modification can be used in siRNA sequences to achieve high activity.

### (5) Basic Sequence 84

TABLE 18
Inhibition rate against PCSK9 gene by
template-modified basic sequence 84

| | | | Inhibition | |
|---|---|---|---|---|
| | | Inhibition | rate (%) of | |
| | | rate (%) of | corresponding | |
| Basic | Template- | template- | alternately- | |
| sequence | modified | modified | modified | Increase |
| NO. | sequence No. | sequence | sequence | (%) |
| 84 | P92-si84-DV25 | 86.0 | 61.6 | 24.4 |
| | P92-si84-DV26 | 85.7 | 61.6 | 24.1 |
| | P92-si84-DV27 | 86.8 | 61.6 | 25.2 |
| | P92-si84-DV28 | 88.4 | 61.6 | 26.8 |
| | P92-si84-DV29 | 87.5 | 61.6 | 25.9 |
| | P92-si84-DV30 | 70.3 | 61.6 | 8.7 |
| | P92-si84-DV31 | 72.4 | 61.6 | 10.8 |
| | P92-si84-DV21 | 77.7 | 61.6 | 16.1 |
| | P92-si84-DV22 | 75.1 | 61.6 | 13.5 |

### I. DV25-29 Templates of the Present Disclosure

[0424] Basic sequence 84 modified with the modification templates DV25-29 designed by the present disclosure exhibited an inhibition rate against the PCSK9 gene exceeding 85%. Compared with the alternate modification with 2′-position methoxy and 2′-position fluorine, the inhibition rate against the PCSK9 gene increased significantly. For example, after modification with templates DV28 and DV29, the inhibition rates of P92-si84-DV28 and P92-si84-DV29 increased by 26.8% and 25.9% respectively.

### II. Other Modification Templates of the Present Disclosure

[0425] P92-si84-DV30 and P92-si84-DV31 obtained by modifying basic sequence 84 with templates DV30 and DV31 had inhibition rates against the PCSK9 gene of 70.3% and 72.4% respectively, which were 8.7% and 10.8% higher than that of the corresponding alternately modified sequences.

[0426] P92-si84-DV28 and P92-si84-DV29 modified with templates DV28 and DV29 of the present disclosure increased the inhibition rate by 18.1% and 17.2% compared with

[0427] P92-si84-DV30, and increased by 16.0% and 15.1% compared with P92-si84-DV31, indicating a significant improvement.

III. Advanced ESC Templates DV21 (Fluorinated Sites: Positions 2, 6, 14 and 16 on the Antisense Strand and Positions 7, 9, 10, 11, 16 and 17 on the Sense Strand) and DV22 (Fluorinated Sites: Positions 2, 6, 14 and 16 on the Antisense Strand and Positions 7, 9, 10 and 11 on the Sense Strand) Disclosed in the Prior Art

[0428] P92-si84-DV21 and P92-si84-DV22 obtained by modifying basic sequence 84 with templates DV21 and DV22 had inhibition rates against the PCSK9 gene of 77.7% and 75.1% respectively, which were 16.1% and 13.5% higher than that of the corresponding alternately modified sequences, respectively.

[0429] P92-si84-DV28 and P92-si84-DV29 modified with templates DV28 and DV29 of the present disclosure increased the inhibition rate by 10.7% and 9.8% compared with P92-si84-DV21, and increased by 13.3% and 12.4% compared with P92-si84-DV22, indicating a significant improvement.

[0430] It can be concluded that:

[0431] 1) After modification on basic sequence 84 using the modification templates DV25-29 of the present disclosure, the inhibition effect on the PCSK9 gene was significantly improved compared with the alternately modified sequences. For example, the inhibition rate of the basic sequence 84 modified with DV28 was 26.8% higher than that of the alternately modified sequence.

[0432] 2) The activity varied greatly after the same siRNA sequence was modified with different modification templates. For example, the inhibition rate of the sequences obtained by modifying basic sequence 84 with modification templates DV28 and DV29 of the present disclosure can be increased by up to 18.1% compared with the sequences modified with modification templates DV30 and DV31 of the present disclosure, indicating a significant improvement; and can be increased by up to 13.3% compared with the sequences modified with the disclosed Advanced ESC templates DV21 and DV22, indicating a significant improvement.

[0433] 3) The activity of siRNA sequences modified with different templates varied greatly, up to 20% difference. It can be seen that it is uncertain which template modification can be used in siRNA sequences to achieve high activity.

### (6) Basic Sequence 3

TABLE 19
Inhibition rate against PCSK9 gene by
template-modified basic sequence 3

| | | | Inhibition | |
|---|---|---|---|---|
| | | Inhibition | rate (%) of | |
| | | rate (%) of | corresponding | |
| Basic | Template- | template- | alternately- | |
| sequence | modified | modified | modified | Increase |
| NO. | sequence No. | sequence | sequence | (%) |
| 3 | P92-si3-DV25 | 79.7 | 60.3 | 19.4 |
| | P92-si3-DV26 | 80.9 | 60.3 | 20.6 |
| | P92-si3-DV27 | 83.0 | 60.3 | 22.7 |
| | P92-si3-DV28 | 84.3 | 60.3 | 24.0 |
| | P92-si3-DV29 | 85.0 | 60.3 | 24.7 |

[0434] 1) Basic sequence 3 modified with the modification templates DV25-29 designed by the present disclosure exhibited an inhibition rate against the PCSK9 gene exceeding 75%. Compared with the alternate modification with 2′-position methoxy and 2′-position fluorine, the inhibition rate against the PCSK9 gene increased significantly. For example, after modification with templates DV28 and DV29, the inhibition rates of P92-si3-DV28 and P92-si3-DV29 increased by 24.0% and 24.7% respectively.

[0435] 2) It can be concluded that after modification on basic sequence 3 using the modification templates DV25-29 of the present disclosure, the inhibition effect on the PCSK9 gene was significantly improved compared with the alternately modified sequences.

### (7) Basic Sequence 8

TABLE 20
Inhibition rate against PCSK9 gene by
template-modified basic sequence 8

| | | Inhibition | | |
|---|---|---|---|---|
| | Template- | rate (%) of | Inhibition rate (%) | |
| Basic | modified | template- | of corresponding | |
| sequence | sequence | modified | alternately- | Increase |
| NO. | No. | sequence | modified sequence | (%) |
| 8 | P92-si8-DV25 | 79.8 | 61.9 | 17.9 |
| | P92-si8-DV26 | 80.6 | 61.9 | 18.7 |
| | P92-si8-DV27 | 81.6 | 61.9 | 19.7 |
| | P92-si8-DV28 | 82.1 | 61.9 | 20.2 |
| | P92-si8-DV29 | 79.5 | 61.9 | 17.6 |

[0436] 1) Basic sequence 8 modified with the modification templates DV25-29 designed by the present disclosure exhibited an inhibition rate against the PCSK9 gene exceeding 75%. Compared with the alternate modification with 2′-position methoxy and 2′-position fluorine, the inhibition rate against the PCSK9 gene increased significantly. For example, after modification with templates DV27 and DV28, the inhibition rates of P92-si8-DV27 and P92-si8-DV28 increased by 19.7% and 20.2% respectively.

[0437] 2) It can be concluded that after modification on basic sequence 8 using the modification templates DV25-29 of the present disclosure, the inhibition effect on the PCSK9 gene was significantly improved compared with the alternately modified sequences.

### (8) Basic Sequence 9

TABLE 21
Inhibition rate against PCSK9 gene by
template-modified basic sequence 9

| | | Inhibition | | |
|---|---|---|---|---|
| | Template- | rate (%) of | Inhibition rate (%) | |
| Basic | modified | template- | of corresponding | |
| sequence | sequence | modified | alternately- | Increase |
| NO. | No. | sequence | modified sequence | (%) |
| 9 | P92-si9-DV25 | 71.9 | 52.4 | 19.5 |
| | P92-si9-DV26 | 73.7 | 52.4 | 21.3 |
| | P92-si9-DV27 | 79.6 | 52.4 | 27.2 |
| | P92-si9-DV28 | 77.8 | 52.4 | 25.4 |
| | P92-si9-DV29 | 76.8 | 52.4 | 24.4 |

[0438] 1) Basic sequence 9 modified with the modification templates DV25-29 designed by the present disclosure exhibited an inhibition rate against the PCSK9 gene exceeding 70%. Compared with the alternate modification with 2′-position methoxy and 2′-position fluorine, the inhibition rate against the PCSK9 gene increased significantly. For example, after modification with templates DV27 and DV28, the inhibition rates of P92-si9-DV27 and P92-si9-DV28 increased by 27.2% and 25.4% respectively.

[0439] 2) It can be concluded that after modification on basic sequence 9 using the modification templates DV25-29 of the present disclosure, the inhibition effect on the PCSK9 gene was significantly improved compared with the alternately modified sequences.

### (9) Basic Sequence 21

TABLE 22
Inhibition rate against PCSK9 gene by
template-modified basic sequence 21

| | | Inhibition | | |
|---|---|---|---|---|
| | Template- | rate (%) of | Inhibition rate (%) | |
| Basic | modified | template- | of corresponding | |
| sequence | sequence | modified | alternately-modified | Increase |
| NO. | No. | sequence | sequence | (%) |
| 21 | P92-si21-DV25 | 74.0 | 49.6 | 24.4 |
| | P92-si21-DV26 | 76.1 | 49.6 | 26.5 |
| | P92-si21-DV27 | 71.1 | 49.6 | 21.5 |
| | P92-si21-DV28 | 71.5 | 49.6 | 21.9 |
| | P92-si21-DV29 | 72.0 | 49.6 | 22.4 |

[0440] 1) Basic sequence 21 modified with the modification templates DV25-29 designed by the present disclosure exhibited an inhibition rate against the PCSK9 gene exceeding 70%. Compared with the alternate modification with 2′-position methoxy and 2′-position fluorine, the inhibition rate against the PCSK9 gene increased significantly. For example, after modification with templates DV25 and DV26, the inhibition rates of P92-si21-DV25 and P92-si21-DV26 increased by 24.4% and 26.5% respectively.

[0441] 2) It can be concluded that after modification on basic sequence 21 using the modification templates DV25-29 of the present disclosure, the inhibition effect on the PCSK9 gene was significantly improved compared with the alternately modified sequences.

### (10) Basic Sequence 31

TABLE 23
Inhibition rate against PCSK9 gene by
template-modified basic sequence 31

| | | Inhibition | | |
|---|---|---|---|---|
| | Template- | rate (%) of | Inhibition rate (%) | |
| Basic | modified | template- | of corresponding | |
| sequence | sequence | modified | alternately- | Increase |
| NO. | No. | sequence | modified sequence | (%) |
| 31 | P92-si31-DV25 | 79.2 | 56.3 | 22.9 |
| | P92-si31-DV26 | 78.9 | 56.3 | 22.6 |
| | P92-si31-DV27 | 71.2 | 56.3 | 14.9 |
| | P92-si31-DV28 | 70.6 | 56.3 | 14.3 |
| | P92-si31-DV29 | 70.0 | 56.3 | 13.7 |

[0442] 1) Basic sequence 31 modified with the modification templates DV25-29 designed by the present disclosure exhibited an inhibition rate against the PCSK9 gene exceeding 70%. Compared with the alternate modification with 2′-position methoxy and 2′-position fluorine, the inhibition rate against the PCSK9 gene increased significantly. For example, after modification with templates DV25 and DV26, the inhibition rates of P92-si31-DV25 and P92-si31-DV26 increased by 22.9% and 22.6% respectively.

[0443] 2) It can be concluded that after modification on basic sequence 31 using the modification templates DV25-29 of the present disclosure, the inhibition effect on the PCSK9 gene was significantly improved compared with the alternately modified sequences.

### (11) Basic Sequence 73

TABLE 24
Inhibition rate against PCSK9 gene by
template-modified basic sequence 73

| | | Inhibition | | |
|---|---|---|---|---|
| | Template- | rate (%) of | Inhibition rate (%) | |
| Basic | modified | template- | of corresponding | |
| sequence | sequence | modified | alternately- | Increase |
| NO. | No. | sequence | modified sequence | (%) |
| 73 | P92-si73-DV25 | 70.1 | 49.4 | 20.7 |
| | P92-si73-DV26 | 71.8 | 49.4 | 22.4 |
| | P92-si73-DV27 | 77.6 | 49.4 | 28.2 |
| | P92-si73-DV28 | 80.0 | 49.4 | 30.6 |
| | P92-si73-DV29 | 82.1 | 49.4 | 32.7 |

[0444] 1) Basic sequence 73 modified with the modification templates DV25-29 designed by the present disclosure exhibited an inhibition rate against the PCSK9 gene exceeding 70%. Compared with the alternate modification with 2′-position methoxy and 2′-position fluorine, the inhibition rate against the PCSK9 gene increased significantly. For example, after modification with templates DV28 and DV29, the inhibition rates of P92-si73-DV28 and P92-si73-DV29 increased by 30.6% and 32.7% respectively.

[0445] 2) It can be concluded that after modification on basic sequence 73 using the modification templates DV25-29 of the present disclosure, the inhibition effect on the PCSK9 gene was significantly improved compared with the alternately modified sequences.

### (12) Basic Sequence 83

TABLE 25
Inhibition rate against PCSK9 gene by
template-modified basic sequence 83

| | | Inhibition | | |
|---|---|---|---|---|
| | Template- | rate (%) of | Inhibition rate (%) | |
| Basic | modified | template- | of corresponding | |
| sequence | sequence | modified | alternately- | Increase |
| NO. | No. | sequence | modified sequence | (%) |
| 83 | P92-si83-DV25 | 77.9 | 51.7 | 26.2 |
| | P92-si83-DV26 | 75.0 | 51.7 | 23.3 |
| | P92-si83-DV27 | 82.6 | 51.7 | 30.9 |
| | P92-si83-DV28 | 78.6 | 51.7 | 26.9 |
| | P92-si83-DV29 | 81.4 | 51.7 | 29.7 |

[0446] 1) Basic sequence 83 modified with the modification templates DV25-29 designed by the present disclosure exhibited an inhibition rate against the PCSK9 gene exceeding 75%. Compared with the alternate modification with 2′-position methoxy and 2′-position fluorine, the inhibition rate against the PCSK9 gene increased significantly. For example, after modification with templates DV27 and DV29, the inhibition rates of P92-si83-DV27 and P92-si83-DV29 increased by 30.9% and 29.7% respectively.

[0447] 2) It can be concluded that after modification on basic sequence 83 using the modification templates DV25-29 of the present disclosure, the inhibition effect on the PCSK9 gene was significantly improved compared with the alternately modified sequences.

### SUMMARY

[0448] (1) The screened basic sequences 5, 51, 81, 82, 84, 3, 8, 9, 21, 31, 73 and 83, after being modified with the modification templates DV25-29 designed in the present disclosure, exhibited a significant inhibitory effect on PCSK9 gene expression, with an inhibition rate above 70%, among which the inhibition rates of P92-si81-DV26, P92-si82-DV27 and P92-si82-DV29 reached 89.3%, 89.3% and 89.1%, respectively.

[0449] (2) The above 12 sequences modified with the modification templates DV25-29 of the present disclosure significantly improved the inhibition rate against the PCSK9 gene expression compared with the alternately modified sequences. For example, P92-si51-DV27 obtained by modifying basic sequence 51 with templates DV27 increased the inhibition rate by 29.1% compared to the alternately modified sequence, and P92-si81-DV26 obtained by modifying basic sequence 81 with templates DV26 increased the inhibition rate by 26.9% compared to the alternately modified sequence.

[0450] (3) The sequences modified on the same sequence with the modification templates DV25-29 of the present disclosure significantly improved the inhibition rate against the PCSK9 gene expression compared with using the modification templates disclosed in the prior art. For example, basic sequence 51 modified with the modification template DV27 of the present disclosure increased the inhibition rate by 21.3% compared with the disclosed Advanced ESC template DV21.

[0451] (4) The sequences modified on the same sequence with the modification templates DV25-29 of the present disclosure significantly improved the inhibition rate against the PCSK9 gene expression compared with using other modification templates DV30 and DV31 of the present disclosure. For example, basic sequence 51 modified with the modification template DV27 of the present disclosure increased the inhibition rate by 22.8% compared with the modification template DV31 of the present disclosure.

[0452] (5) The activity of sequences modified with different template varied greatly. For example, the sequence obtained by modifying basic sequence 5 with DV26 increased the inhibition rate by 22.5% compared with the sequence modified with DV31; the sequence obtained by modifying basic sequence 51 with DV27 increased the inhibition rate by 20.5% compared with the sequence modified with DV22. It can be concluded that it is uncertain which modification template should be used to modify the siRNA sequence to achieve high activity.

### (ii) EC50 Experiment

[0453] Some template-modified sequences were selected for the EC50 experiment, including P92-si5-DV26, P92-si51-DV25, P92-si81-DV27, P92-si82-DV27, P92-si84-DV26, P92-si3-DV28, P92-si8-DV29, P92-si9-DV28, P92-si21-DV25, P92-si31-DV27, P92-si73-DV28 and P92-si83-DV26, a total of 12 sequences, in order to determine the EC50 concentration of each sequence. The experimental results are shown in Table 26.

TABLE 26
EC50 experimental results of each modified sequence

| Sequence No. | Sequence EC50 (nM) |
|---|---|
| P92-si5-DV26 | 0.0010 |
| P92-si51-DV25 | 0.0027 |
| P92-si81-DV27 | 0.0003 |
| P92-si82-DV27 | 0.0006 |
| P92-si84-DV26 | 0.0004 |
| P92-si3-DV28 | 0.0022 |
| P92-si8-DV29 | 0.0039 |
| P92-si9-DV28 | 0.0047 |
| P92-si21-DV25 | 0.0048 |
| P92-si31-DV27 | 0.0035 |
| P92-si73-DV28 | 0.0044 |
| P92-si83-DV26 | 0.0025 |

[0454] As can be seen from Table 26, the EC50 values of these 12 sequences were between 0.0001 nM and 0.005 nM, among which the EC50 values of P92-si81-DV27, P92-si84-DV26 and P92-si82-DV27 were 0.0003 nM, 0.0004 nM and 0.0006 nM, respectively. These results demonstrate that the sequences can effectively inhibit PCSK9 gene expression at low concentrations.

### Example 5: Comparison with the Inhibitory Effect of the Sequences Disclosed in the Prior Art on the PCSK9 Gene

[0455] In this example, the inhibition efficiency of the PCSK9 gene was compared between the unmodified sequences disclosed in the prior art that were identical or similar to the basic sequences 3, 5, 8, 9, 31, 81, 82, 83 and 84 of the present disclosure, and the alternately modified sequences and the sequences modified with the templates DV25-29 of the present disclosure.

### 1. Experimental Materials

### Test Samples:

[0456] (1) Sequences disclosed in the prior art

TABLE 27
Sequences disclosed in the prior art

| Sequence | | | Sequence | | Sequence | |
|---|---|---|---|---|---|---|
| No. | Position | Sense strand | ID NO. | Antisense strand | ID NO. | Source |
| si81 | 3546 | CUUUUGUAACUU | 3 | AAUAUCUUCAAGUU | 15 | CN11599 |
| | | GAAGAUAUU | | ACAAAAGCA | | 2138 A |
| si84 | 3574 | GUUUUGUAGCAU | 5 | UUAAUAAAAAUGC | 17 | CN11599 |
| | | UUUUAUUAA | | UACAAAACCC | | 2138 A |
| si3 | 614 | CACCAAGAUCCUG | 6 | AAGACAUGCAGGAU | 18 | Page 104, |
| | | CAUGUCUU | | CUUGGUGAG | | WO20140 |
| | | | | | | 89313 A1 |
| si8 | 1083 | CUCAUAGGCCUGG | 7 | AAUAAACUCCAGGC | 19 | Page 91, |
| | | AGUUUAUU | | CUAUGAGGG | | CN10822 |
| | | | | | | 0295 B |
| si9 | 1089 | GGCCUGGAGUUU | 8 | UUUCCGAAUAAACU | 20 | Page 106, |
| | | AUUCGGAAA | | CCAGGCCUA | | WO20140 |
| | | | | | | 89313 A1 |
| si83 | 3572 | GGGUUUUGUAGC | 12 | AAUAAAAAUGCUAC | 24 | Page 16, |
| | | AUUUUUAUU | | AAAACCCAG | | CN11599 |
| | | | | | | 2138 A |
| 5P | 618 | AAGAUCCUGCAUG | 1 | AUGGAAGACAUGCA | 417 | WO2023/ |
| | | UCUUCCAU | | GGAUCUU | | 017004 A1 |
| 82P | 3557 | GAAGAUAUUUAU | 4 | AAACCCAGAAUAAA | 418 | WO2023/ |
| | | UCUGGGUUU | | UAUCUUC | | 017004 A1 |
| 31P | 2103 | GGUCUGGAAUGC | 10 | CUUGACUUUGCAUU | 419 | Page 25, |
| | | AAAGUCAAG | | CCAGACC | | CN11506 |
| | | | | | | 6498 A |

Note:
The sequences disclosed in the above patent applications were all unmodified sequence RNA.

[0457] (2) siRNA sequences modified alternately with 2′-OMe and 2′-F and terminally thio-modified in Example 2: P92-si5, P92-si81, P92-si82, P92-si84, P92-si3, P92-si8, P92-si9, P92-si31 and P92-si83;

[0458] (3) siRNA sequences modified with the modification templates DV25-29. The specific sequences are shown in Table 28.

TABLE 28
Sequences modified with modification templates DV25-29

| | | | Modified | | Modified |
|---|---|---|---|---|---|
| | | | sequence | | sequence |
| | | | SEQ ID | | SEQ ID |
| | | | NO:/ | | NO:/ |
| | | | Corres- | | Corres- |
| | | | ponding | | ponding |
| | Template- | | basic | | basic |
| Basic | modified | | sequence | | sequence |
| sequence | Sequence | Sense strand sequence | SEQ ID | Antisense strand | SEQ |
| NO. | No. | 5′-3′ | NO: | sequence 5′-3′ | ID NO: |
| 5 | P92-si5- | Ams-Ams-Gm-Am-Um-Cm-C | 337/1 | Ams-Ufs-Gm-Gm-Am-Af-Gm-A | 376/13 |
| | DV25 | f-Um-Gf-Cf-Af-Um-Gm-Um- | | m-Cm-Am-Um-Gm-Cm-Af-Gm- | |
| | | Cm-Um-Uf-Cm-Cm-Am-Um | | Gf-Am-Um-Cm-Um-Ums-Gms-G | |
| | | | | m | |
| | P92-si5- | Ams-Ams-Gm-Am-Um-Cm-C | 337/1 | Ams-Ufs-Gf-Gf-Am-Af-Gm-Am- | 377/13 |
| | DV26 | f-Um-Gf-Cf-Af-Um-Gm-Um- | | Cm-Am-Um-Gm-Cm-Af-Gm-Gf- | |
| | | Cm-Um-Uf-Cm-Cm-Am-Um | | Am-Um-Cm-Um-Ums-Gms-Gm | |
| | P92-si5- | Ams-Ams-Gm-Am-Um-Cm-C | 337/1 | Ams-Ufs-Gm-Gf-Af-Af-Gm-Am- | 378/13 |
| | DV27 | f-Um-Gf-Cf-Af-Um-Gm-Um- | | Cm-Am-Um-Gm-Cm-Af-Gm-Gf- | |
| | | Cm-Um-Uf-Cm-Cm-Am-Um | | Am-Um-Cm-Um-Ums-Gms-Gm | |
| | P92-si5- | Ams-Ams-Gm-Am-Um-Cm-C | 338/1 | Ams-Ufs-Gf-Gf-Am-Af-Gm-Am- | 377/13 |
| | DV28 | f-Um-Gf-Cm-Af-Um-Gm-Um- | | Cm-Am-Um-Gm-Cm-Af-Gm-Gf- | |
| | | Cm-Um-Uf-Cm-Cm-Am-Um | | Am-Um-Cm-Um-Ums-Gms-Gm | |
| | P92-si5- | Ams-Ams-Gm-Am-Um-Cm-C | 338/1 | Ams-Ufs-Gm-Gf-Af-Af-Gm-Am- | 378/13 |
| | DV29 | f-Um-Gf-Cm-Af-Um-Gm-Um- | | Cm-Am-Um-Gm-Cm-Af-Gm-Gf- | |
| | | Cm-Um-Uf-Cm-Cm-Am-Um | | Am-Um-Cm-Um-Ums-Gms-Gm | |
| 81 | P92-si81- | Cms-Ums-Um-Um-Um-Gm-U | 347/3 | Ams-Afs-Um-Am-Um-Cf-Um-U | 384/15 |
| | DV25 | f-Am-Af-Cf-Uf-Um-Gm-Am- | | m-Cm-Am-Am-Gm-Um-Uf-Am- | |
| | | Am-Gm-Af-Um-Am-Um-Um | | Cf-Am-Am-Am-Am-Gms-Cms-A | |
| | | | | m | |
| | P92-si81- | Cms-Ums-Um-Um-Um-Gm-U | 347/3 | Ams-Afs-Uf-Af-Um-Cf-Um-Um- | 385/15 |
| | DV26 | f-Am-Af-Cf-Uf-Um-Gm-Am- | | Cm-Am-Am-Gm-Um-Uf-Am-Cf- | |
| | | Am-Gm-Af-Um-Am-Um-Um | | Am-Am-Am-Am-Gms-Cms-Am | |
| | P92-si81- | Cms-Ums-Um-Um-Um-Gm-U | 347/3 | Ams-Afs-Um-Af-Uf-Cf-Um-Um- | 386/15 |
| | DV27 | f-Am-Af-Cf-Uf-Um-Gm-Am- | | Cm-Am-Am-Gm-Um-Uf-Am-Cf- | |
| | | Am-Gm-Af-Um-Am-Um-Um | | Am-Am-Am-Am-Gms-Cms-Am | |
| | P92-si81- | Cms-Ums-Um-Um-Um-Gm-U | 348/3 | Ams-Afs-Uf-Af-Um-Cf-Um-Um- | 385/15 |
| | DV28 | f-Am-Af-Cm-Uf-Um-Gm-Am- | | Cm-Am-Am-Gm-Um-Uf-Am-Cf- | |
| | | Am-Gm-Af-Um-Am-Um-Um | | Am-Am-Am-Am-Gms-Cms-Am | |
| | P92-si81- | Cms-Ums-Um-Um-Um-Gm-U | 348/3 | Ams-Afs-Um-Af-Uf-Cf-Um-Um- | 386/15 |
| | DV29 | f-Am-Af-Cm-Uf-Um-Gm-Am- | | Cm-Am-Am-Gm-Um-Uf-Am-Cf- | |
| | | Am-Gm-Af-Um-Am-Um-Um | | Am-Am-Am-Am-Gms-Cms-Am | |
| 82 | P92-si82- | Gms-Ams-Am-Gm-Am-Um-A | 352/4 | Ams-Afs-Am-Cm-Cm-Cf-Am-G | 388/16 |
| | DV25 | f-Um-Uf-Uf-Af-Um-Um-Cm- | | m-Am-Am-Um-Am-Am-Af-Um- | |
| | | Um-Gm-Gf-Gm-Um-Um-Um | | Af-Um-Cm-Um-Um-Cms-Ams-A | |
| | | | | m | |
| | P92-si82- | Gms-Ams-Am-Gm-Am-Um-A | 352/4 | Ams-Afs-Af-Cf-Cm-Cf-Am-Gm- | 389/16 |
| | DV26 | f-Um-Uf-Uf-Af-Um-Um-Cm- | | Am-Am-Um-Am-Am-Af-Um-Af- | |
| | | Um-Gm-Gf-Gm-Um-Um-Um | | Um-Cm-Um-Um-Cms-Ams-Am | |
| | P92-si82- | Gms-Ams-Am-Gm-Am-Um-A | 352/4 | Ams-Afs-Am-Cf-Cf-Cf-Am-Gm- | 390/16 |
| | DV27 | f-Um-Uf-Uf-Af-Um-Um-Cm- | | Am-Am-Um-Am-Am-Af-Um-Af- | |
| | | Um-Gm-Gf-Gm-Um-Um-Um | | Um-Cm-Um-Um-Cms-Ams-Am | |
| | P92-si82- | Gms-Ams-Am-Gm-Am-Um-A | 353/4 | Ams-Afs-Af-Cf-Cm-Cf-Am-Gm- | 389/16 |
| | DV28 | f-Um-Uf-Um-Af-Um-Um-Cm- | | Am-Am-Um-Am-Am-Af-Um-Af- | |
| | | Um-Gm-Gf-Gm-Um-Um-Um | | Um-Cm-Um-Um-Cms-Ams-Am | |
| | P92-si82- | Gms-Ams-Am-Gm-Am-Um-A | 353/4 | Ams-Afs-Am-Cf-Cf-Cf-Am-Gm- | 390/16 |
| | DV29 | f-Um-Uf-Um-Af-Um-Um-Cm- | | Am-Am-Um-Am-Am-Af-Um-Af- | |
| | | Um-Gm-Gf-Gm-Um-Um-Um | | Um-Cm-Um-Um-Cms-Ams-Am | |
| 84 | P92-si84- | Gms-Ums-Um-Um-Um-Gm-U | 357/5 | Ums-Ufs-Am-Am-Um-Af-Am-A | 392/17 |
| | DV25 | f-Am-Gf-Cf-Af-Um-Um-Um- | | m-Am-Am-Um-Gm-Cm-Uf-Am- | |
| | | Um-Um-Af-Um-Um-Am-Am | | Cf-Am-Am-Am-Am-Cms-Cms-C | |
| | | | | m | |
| | P92-si84- | Gms-Ums-Um-Um-Um-Gm-U | 357/5 | Ums-Ufs-Af-Af-Um-Af-Am-Am- | 393/17 |
| | DV26 | f-Am-Gf-Cf-Af-Um-Um-Um- | | Am-Am-Um-Gm-Cm-Uf-Am-Cf- | |
| | | Um-Um-Af-Um-Um-Am-Am | | Am-Am-Am-Am-Cms-Cms-Cm | |
| | P92-si84- | Gms-Ums-Um-Um-Um-Gm-U | 357/5 | Ums-Ufs-Am-Af-Uf-Af-Am-Am- | 394/17 |
| | DV27 | f-Am-Gf-Cf-Af-Um-Um-Um- | | Am-Am-Um-Gm-Cm-Uf-Am-Cf- | |
| | | Um-Um-Af-Um-Um-Am-Am | | Am-Am-Am-Am-Cms-Cms-Cm | |
| | P92-si84- | Gms-Ums-Um-Um-Um-Gm-U | 358/5 | Ums-Ufs-Af-Af-Um-Af-Am-Am- | 393/17 |
| | DV28 | f-Am-Gf-Cm-Af-Um-Um-Um- | | Am-Am-Um-Gm-Cm-Uf-Am-Cf- | |
| | | Um-Um-Af-Um-Um-Am-Am | | Am-Am-Am-Am-Cms-Cms-Cm | |
| | P92-si84- | Gms-Ums-Um-Um-Um-Gm-U | 358/5 | Ums-Ufs-Am-Af-Uf-Af-Am-Am- | 394/17 |
| | DV29 | f-Am-Gf-Cm-Af-Um-Um-Um- | | Am-Am-Um-Gm-Cm-Uf-Am-Cf- | |
| | | Um-Um-Af-Um-Um-Am-Am | | Am-Am-Am-Am-Cms-Cms-Cm | |
| 3 | P92-si3- | Cms-Ams-Cm-Cm-Am-Am-Gf | 362/6 | Ams-Afs-Gm-Am-Cm-Af-Um-G | 396/18 |
| | DV25 | -Am-Uf-Cf-Cf-Um-Gm-Cm-A | | m-Cm-Am-Gm-Gm-Am-Uf-Cm- | |
| | | m-Um-Gf-Um-Cm-Um-Um | | Uf-Um-Gm-Gm-Um-Gms-Ams-G | |
| | | | | m | |
| | P92-si3- | Cms-Ams-Cm-Cm-Am-Am-Gf- | 362/6 | Ams-Afs-Gf-Af-Cm-Af-Um-Gm- | 397/18 |
| | DV26 | Am-Uf-Cf-Cf-Um-Gm-Cm-A | | Cm-Am-Gm-Gm-Am-Uf-Cm-Uf- | |
| | | m-Um-Gf-Um-Cm-Um-Um | | Um-Gm-Gm-Um-Gms-Ams-Gm | |
| | P92-si3- | Cms-Ams-Cm-Cm-Am-Am-Gf- | 362/6 | Ams-Afs-Gm-Af-Cf-Af-Um-Gm- | 398/18 |
| | DV27 | Am-Uf-Cf-Cf-Um-Gm-Cm-A | | Cm-Am-Gm-Gm-Am-Uf-Cm-Uf- | |
| | | m-Um-Gf-Um-Cm-Um-Um | | Um-Gm-Gm-Um-Gms-Ams-Gm | |
| | P92-si3- | Cms-Ams-Cm-Cm-Am-Am-Gf- | 363/6 | Ams-Afs-Gf-Af-Cm-Af-Um-Gm- | 397/18 |
| | DV28 | Am-Uf-Cm-Cf-Um-Gm-Cm- | | Cm-Am-Gm-Gm-Am-Uf-Cm-Uf- | |
| | | Am-Um-Gf-Um-Cm-Um-Um | | Um-Gm-Gm-Um-Gms-Ams-Gm | |
| | P92-si3- | Cms-Ams-Cm-Cm-Am-Am-Gf- | 363/6 | Ams-Afs-Gm-Af-Cf-Af-Um-Gm- | 398/18 |
| | DV29 | Am-Uf-Cm-Cf-Um-Gm-Cm- | | Cm-Am-Gm-Gm-Am-Uf-Cm-Uf- | |
| | | Am-Um-Gf-Um-Cm-Um-Um | | Um-Gm-Gm-Um-Gms-Ams-Gm | |
| 8 | P92-si8- | Cms-Ums-Cm-Am-Um-Am-G | 364/7 | Ams-Afs-Um-Am-Am-Af-Cm-U | 399/19 |
| | DV25 | f-Gm-Cf-Cf-Uf-Gm-Gm-Am- | | m-Cm-Cm-Am-Gm-Gm-Cf-Cm-U | |
| | | Gm-Um-Uf-Um-Am-Um-Um | | f-Am-Um-Gm-Am-Gms-Gms-Gm | |
| | P92-si8- | Cms-Ums-Cm-Am-Um-Am-G | 364/7 | Ams-Afs-Uf-Af-Am-Af-Cm-Um- | 400/19 |
| | DV26 | f-Gm-Cf-Cf-Uf-Gm-Gm-Am- | | Cm-Cm-Am-Gm-Gm-Cf-Cm-Uf- | |
| | | Gm-Um-Uf-Um-Am-Um-Um | | Am-Um-Gm-Am-Gms-Gms-Gm | |
| | P92-si8- | Cms-Ums-Cm-Am-Um-Am-G | 364/7 | Ams-Afs-Um-Af-Af-Af-Cm-Um- | 401/19 |
| | DV27 | f-Gm-Cf-Cf-Uf-Gm-Gm-Am- | | Cm-Cm-Am-Gm-Gm-Cf-Cm-Uf- | |
| | | Gm-Um-Uf-Um-Am-Um-Um | | Am-Um-Gm-Am-Gms-Gms-Gm | |
| | P92-si8- | Cms-Ums-Cm-Am-Um-Am-G | 365/7 | Ams-Afs-Uf-Af-Am-Af-Cm-Um- | 400/19 |
| | DV28 | f-Gm-Cf-Cm-Uf-Gm-Gm-Am- | | Cm-Cm-Am-Gm-Gm-Cf-Cm-Uf- | |
| | | Gm-Um-Uf-Um-Am-Um-Um | | Am-Um-Gm-Am-Gms-Gms-Gm | |
| | P92-si8- | Cms-Ums-Cm-Am-Um-Am-G | 365/7 | Ams-Afs-Um-Af-Af-Af-Cm-Um- | 401/19 |
| | DV29 | f-Gm-Cf-Cm-Uf-Gm-Gm-Am- | | Cm-Cm-Am-Gm-Gm-Cf-Cm-Uf- | |
| | | Gm-Um-Uf-Um-Am-Um-Um | | Am-Um-Gm-Am-Gms-Gms-Gm | |
| 9 | P92-si9- | Gms-Gms-Cm-Cm-Um-Gm-G | 366/8 | Ums-Ufs-Um-Cm-Cm-Gf-Am-A | 402/20 |
| | DV25 | f-Am-Gf-Uf-Uf-Um-Am-Um- | | m-Um-Am-Am-Am-Cm-Uf-Cm- | |
| | | Um-Cm-Gf-Gm-Am-Am-Am | | Cf-Am-Gm-Gm-Cm-Cms-Ums-A | |
| | | | | m | |
| | P92-si9- | Gms-Gms-Cm-Cm-Um-Gm-G | 366/8 | Ums-Ufs-Uf-Cf-Cm-Gf-Am-Am- | 403/20 |
| | DV26 | f-Am-Gf-Uf-Uf-Um-Am-Um- | | Um-Am-Am-Am-Cm-Uf-Cm-Cf- | |
| | | Um-Cm-Gf-Gm-Am-Am-Am | | Am-Gm-Gm-Cm-Cms-Ums-Am | |
| | P92-si9- | Gms-Gms-Cm-Cm-Um-Gm-G | 366/8 | Ums-Ufs-Um-Cf-Cf-Gf-Am-Am- | 404/20 |
| | DV27 | f-Am-Gf-Uf-Uf-Um-Am-Um- | | Um-Am-Am-Am-Cm-Uf-Cm-Cf- | |
| | | Um-Cm-Gf-Gm-Am-Am-Am | | Am-Gm-Gm-Cm-Cms-Ums-Am | |
| | P92-si9- | Gms-Gms-Cm-Cm-Um-Gm-G | 367/8 | Ums-Ufs-Uf-Cf-Cm-Gf-Am-Am- | 403/20 |
| | DV28 | f-Am-Gf-Um-Uf-Um-Am-Um- | | Um-Am-Am-Am-Cm-Uf-Cm-Cf- | |
| | | Um-Cm-Gf-Gm-Am-Am-Am | | Am-Gm-Gm-Cm-Cms-Ums-Am | |
| | P92-si9- | Gms-Gms-Cm-Cm-Um-Gm-G | 367/8 | Ums-Ufs-Um-Cf-Cf-Gf-Am-Am- | 404/20 |
| | DV29 | f-Am-Gf-Um-Uf-Um-Am-Um- | | Um-Am-Am-Am-Cm-Uf-Cm-Cf- | |
| | | Um-Cm-Gf-Gm-Am-Am-Am | | Am-Gm-Gm-Cm-Cms-Ums-Am | |
| 31 | P92-si31- | Gms-Gms-Um-Cm-Um-Gm-G | 370/10 | Cms-Ufs-Um-Gm-Am-Cf-Um-U | 408/22 |
| | DV25 | f-Am-Af-Uf-Gf-Cm-Am-Am- | | m-Um-Gm-Cm-Am-Um-Uf-Cm- | |
| | | Am-Gm-Uf-Cm-Am-Am-Gm | | Cf-Am-Gm-Am-Cm-Cms-Ums-G | |
| | | | | m | |
| | P92-si31- | Gms-Gms-Um-Cm-Um-Gm-G | 370/10 | Cms-Ufs-Uf-Gf-Am-Cf-Um-Um- | 409/22 |
| | DV26 | f-Am-Af-Uf-Gf-Cm-Am-Am- | | Um-Gm-Cm-Am-Um-Uf-Cm-Cf- | |
| | | Am-Gm-Uf-Cm-Am-Am-Gm | | Am-Gm-Am-Cm-Cms-Ums-Gm | |
| | P92-si31- | Gms-Gms-Um-Cm-Um-Gm-G | 370/10 | Cms-Ufs-Um-Gf-Af-Cf-Um-Um- | 410/22 |
| | DV27 | f-Am-Af-Uf-Gf-Cm-Am-Am- | | Um-Gm-Cm-Am-Um-Uf-Cm-Cf- | |
| | | Am-Gm-Uf-Cm-Am-Am-Gm | | Am-Gm-Am-Cm-Cms-Ums-Gm | |
| | P92-si31- | Gms-Gms-Um-Cm-Um-Gm-G | 371/10 | Cms-Ufs-Uf-Gf-Am-Cf-Um-Um- | 409/22 |
| | DV28 | f-Am-Af-Um-Gf-Cm-Am-Am- | | Um-Gm-Cm-Am-Um-Uf-Cm-Cf- | |
| | | Am-Gm-Uf-Cm-Am-Am-Gm | | Am-Gm-Am-Cm-Cms-Ums-Gm | |
| | P92-si31- | Gms-Gms-Um-Cm-Um-Gm-G | 371/10 | Cms-Ufs-Um-Gf-Af-Cf-Um-Um- | 410/22 |
| | DV29 | f-Am-Af-Um-Gf-Cm-Am-Am- | | Um-Gm-Cm-Am-Um-Uf-Cm-Cf- | |
| | | Am-Gm-Uf-Cm-Am-Am-Gm | | Am-Gm-Am-Cm-Cms-Ums-Gm | |
| 83 | P92-si83- | Gms-Gms-Gm-Um-Um-Um-U | 374/12 | Ams-Afs-Um-Am-Am-Af-Am-A | 414/24 |
| | DV25 | f-Gm-Uf-Af-Gf-Cm-Am-Um- | | m-Um-Gm-Cm-Um-Am-Cf-Am- | |
| | | Um-Um-Uf-Um-Am-Um-Um | | Af-Am-Am-Cm-Cm-Cms-Ams-G | |
| | | | | m | |
| | P92-si83- | Gms-Gms-Gm-Um-Um-Um-U | 374/12 | Ams-Afs-Uf-Af-Am-Af-Am-Am- | 415/24 |
| | DV26 | f-Gm-Uf-Af-Gf-Cm-Am-Um- | | Um-Gm-Cm-Um-Am-Cf-Am-Af- | |
| | | Um-Um-Uf-Um-Am-Um-Um | | Am-Am-Cm-Cm-Cms-Ams-Gm | |
| | P92-si83- | Gms-Gms-Gm-Um-Um-Um-U | 374/12 | Ams-Afs-Um-Af-Af-Af-Am-Am- | 416/24 |
| | DV27 | f-Gm-Uf-Af-Gf-Cm-Am-Um- | | Um-Gm-Cm-Um-Am-Cf-Am-Af- | |
| | | Um-Um-Uf-Um-Am-Um-Um | | Am-Am-Cm-Cm-Cms-Ams-Gm | |
| | P92-si83- | Gms-Gms-Gm-Um-Um-Um-U | 375/12 | Ams-Afs-Uf-Af-Am-Af-Am-Am- | 415/24 |
| | DV28 | f-Gm-Uf-Am-Gf-Cm-Am-Um- | | Um-Gm-Cm-Um-Am-Cf-Am-Af- | |
| | | Um-Um-Uf-Um-Am-Um-Um | | Am-Am-Cm-Cm-Cms-Ams-Gm | |
| | P92-si83- | Gms-Gms-Gm-Um-Um-Um-U | 375/12 | Ams-Afs-Um-Af-Af-Af-Am-Am- | 416/24 |
| | DV29 | f-Gm-Uf-Am-Gf-Cm-Am-Um- | | Um-Gm-Cm-Um-Am-Cf-Am-Af- | |
| | | Um-Um-Uf-Um-Am-Um-Um | | Am-Am-Cm-Cm-Cms-Ams-Gm | |

[0459] Cell type: Hep3B cells, provided by Shanghai WuXi AppTec New Drug Development Co., Ltd. (ATCC-tings-1618164).

[0460] Hep3B cells were cultured in EMEM medium (ATCC-30-2003) containing 10% fetal bovine serum (FBS, ExCell Bio-FSP500), 1% penicillin-streptomycin (HyClone-SV30010), 1% non-essential amino acid solution (Gibco-11140-050), and 1% GlutaMAX supplement (Gibco-35050-061).

[0461] Drug solvent: DNase/RNase-free water (Nuclease-free water), Gibco DMEM.

### 2. Experimental Methods

[0462] The inhibition of the mRNA expression of the PCSK9 gene by the test samples was detected in the HEP3B cell line using qRT-PCR.

### 2.1 Cell Culture

[0463] The subcultured HEP3B cell line cells were used. The logarithmically growing cells were cultured with 10% fetal bovine serum RPMI 1640 medium (supplemented with 100 μL/mL of penicillin and streptomycin) in a cell culture incubator at 37° C. containing 5% CO₂, and the medium was changed once a day. The cells were digested with 0.25% trypsin and centrifuged at 1000 r/min for 5 min. The supernatant was discarded, and fresh culture medium was added for subculture.

### 2.2 Cell Transfection

[0464] 2 μL of siRNA (1 μg/μL) was added to 18 μL of DNase/RNase-free water according to a ratio of 1:0.06 (wt/wt) and mixed well. Then 22 μL of prepared LNP was added, mixed well and left to stand at room temperature for 15 min. 12.5 μL of the mixture was used for detection of encapsulation efficiency. The final transfection volume per well was =(1 μg theoretical sample volume/siRNA purity)/drug loading concentration, and the final siRNA concentration was 0.05 nM.

[0465] Negative control group: 22 μL of prepared LNP was added to 20 μL of DNase/RNase-free water, mixed well, and left to stand at room temperature for 15 min.

[0466] After mixing using the cross method, the plate was placed in a 37° C., 5% CO₂ cell culture incubator for 40 h.

2.3 PCSK9 mRNA Detection

### 1) RNA Extraction

[0467] The steps were the same as “1) RNA extraction” in “2.3 PCSK9 mRNA detection” in Example 2.

### 2) RNA Concentration Detection

[0468] The steps were the same as those in “2) RNA concentration detection” in “2.3 PCSK9 mRNA detection” in Example 2.

3) PCSK9 mRNA Quantitative Detection

[0469] In a 15 mL centrifuge tube, the remaining components except primers and template were added in 7.5×48=360 portions, marked as A.

[0470] 1.5 mL EP tubes were labeled. 77 μL of A and 420 ng of total RNA were added to each tube and mixed well for later use.

[0471] The upstream and downstream primers of the internal reference gene GAPDH and the target gene PCSK9 were mixed well for later use.

[0472] 11 μL of B+1 μL of C were added to each well of a PCR plate, which was covered with a sealing film, centrifuged at 3000 rpm for 1 min, and transferred to the instrument.

[0473] *This step was performed on ice to maintain low temperature conditions.

[0474] The plate was placed into the qPCR instrument and subjected to the following program:
[0475] Reverse transcription: 55° C., 15 min;
[0476] Pre-denaturation: 95° C., 30 sec;
[0477] Cyclic reaction: 95° C., 10 sec; 60° C., 35 sec; 40 cycles;
[0478] Melting curve: 95° C., 15 sec; 60° C., 60 sec; 95° C., 15 sec.

[0479] The running time was about 2 h. The experimental results were analyzed and 2-ΔΔCt was calculated.

### 2.4 Data Processing

[0480] The PCSK9 mRNA expression rate (%) was calculated as follows:

Expression rate=(PCSK9 mRNA expression level/PCSK9 mRNA expression level in blank control group)×100%;

PCSK9 gene expression inhibition rate=1−expression rate (%).

### 3. Experimental Results

[0481] The specific experimental results are shown in Table 29 and Table 30.

[0482] Experimental results show that the alternately modified sequences and sequences modified with specific modification templates in the present disclosure significantly improve PCSK9 inhibitory activity compared with the same or similar unmodified sequences disclosed in the prior art. For example, the inhibition rate of the unmodified sequence si84 was 38.6%. The inhibition rate after alternate modification was 61.6%, which was 23.0% higher than the unmodified sequence si84, and the inhibition rate after modification with the modification template DV26 of the present disclosure reached 86.8%, which was 48.2% higher than the unmodified sequence.

[0483] Sequence 31P disclosed in the prior art differs from sequence si31 of the present disclosure only in 2 missing bases UG at the 3′-end of the antisense chain, and the remaining bases are identical. However, the inhibition rate of the unmodified sequence si31 of the present disclosure was 10.4% higher than 31P, the inhibition rate of the alternately modified sequence was 59.5%, which was 21.2% higher than 31P, and the inhibition rate after modification with the modification template DV26 of the present disclosure reached 80.2%, which was 41.9% higher than 31P.

(1) Compared with the Identical Unmodified Sequences Disclosed in the Prior Art, the Alternately Modified Sequences and the Sequences Modified with the Specific Modification Templates of the Present Disclosure Significantly Improved the Inhibition Rate Against PCSK9 Gene, which can be Increased by Up to 40%.

[0484] Compared with the identical sequences disclosed in the prior art, the alternately modified sequences and the sequences modified using specific modification templates in the present disclosure significantly improved the inhibition rate against PCSK9 gene. For example, the inhibition rate of the unmodified sequence si84 was 38.6%. The inhibition rate after alternate modification was 61.6%, which was 23.0% higher than the unmodified sequence si84, and the inhibition rate after modification with the modification template DV26 of the present disclosure reached 86.8%, which was 48.2% higher than the unmodified sequence.

TABLE 29
Inhibition rate against the PCSK9 gene by the identical sequences of the prior art

| | | Alternately modified sequence | | | Template-modified sequence | | |
|---|---|---|---|---|---|---|---|
| | | | | Increase (%) | | | Increase (%) |
| | | | | compared | | | compared |
| Sequences | | | | with | | | with |
| disclosed in | | | | sequences | | | sequences |
| the prior art | | | | disclosed | | | disclosed |
| | Inhibition | Sequence | Inhibition | in the | Sequence | Inhibition | in the |
| Name | rate (%) | No. | rate (%) | prior art | No. | rate (%) | prior art |
| si81 | 50.0 | P92-si81 | 60.4 | 10.4 | P92-si81-DV25 | 85.5 | 35.5 |
| | | | | | P92-si81-DV26 | 87.7 | 37.7 |
| | | | | | P92-si81-DV27 | 86.7 | 36.7 |
| | | | | | P92-si81-DV28 | 84.6 | 34.6 |
| | | | | | P92-si81-DV29 | 84.0 | 34.0 |
| si84 | 38.6 | P92-si84 | 61.6 | 23.0 | P92-si84-DV25 | 84.9 | 46.3 |
| | | | | | P92-si84-DV26 | 86.8 | 48.2 |
| | | | | | P92-si84-DV27 | 84.5 | 45.9 |
| | | | | | P92-si84-DV28 | 86.2 | 47.6 |
| | | | | | P92-si84-DV29 | 86.4 | 47.8 |
| si3 | 51.7 | P92-si3 | 61.7 | 10.0 | P92-si3-DV25 | 77.4 | 25.7 |
| | | | | | P92-si3-DV26 | 78.5 | 26.8 |
| | | | | | P92-si3-DV27 | 84.2 | 32.5 |
| | | | | | P92-si3-DV28 | 82.5 | 30.8 |
| | | | | | P92-si3-DV29 | 85.2 | 33.5 |
| si8 | 55.2 | P92-si8 | 62.4 | 7.2 | P92-si8-DV25 | 77.2 | 22.0 |
| | | | | | P92-si8-DV26 | 78.3 | 23.1 |
| | | | | | P92-si8-DV27 | 72.0 | 16.8 |
| | | | | | P92-si8-DV28 | 73.1 | 17.9 |
| | | | | | P92-si8-DV29 | 74.8 | 19.6 |
| si9 | 41.5 | P92-si9 | 54.7 | 13.2 | P92-si9-DV25 | 71.2 | 29.7 |
| | | | | | P92-si9-DV26 | 70.8 | 29.3 |
| | | | | | P92-si9-DV27 | 80.1 | 38.6 |
| | | | | | P92-si9-DV28 | 76.5 | 35.0 |
| | | | | | P92-si9-DV29 | 75.0 | 33.5 |
| si83 | 35.2 | P92-si83 | 51.5 | 16.3 | P92-si83-DV25 | 78.6 | 43.4 |
| | | | | | P92-si83-DV26 | 77.3 | 42.1 |
| | | | | | P92-si83-DV27 | 81.4 | 46.2 |
| | | | | | P92-si83-DV28 | 79.2 | 44.0 |
| | | | | | P92-si83-DV29 | 83.4 | 48.2 |

[0485] The unmodified sequences si81, si84, si3, si8, si9 and si83 disclosed in the prior art in Table 29 were identical to the sequences of the present disclosure. After alternate modification and modification with the modification templates of the present disclosure, the inhibitory effect on PCSK9 was significantly improved. For example, the inhibition rate of the unmodified sequence si84 was 38.6%. After alternate modification, the inhibition rate of P92-si84 was 61.6%, which was 23.0% higher than the unmodified sequence si84. After modification with the modification templates DV25-29 of the present disclosure, the inhibition rates of P92-si84-DV25, P92-si84-DV26, P92-si84-DV27, P92-si84-DV28 and P92-si84-DV29 reached 84.9%, 86.8%, 84.5%, 86.2% and 86.4% respectively, which were all 40% higher than the unmodified sequence si84.

(2) Compared with the Unmodified Sequences Disclosed in the Prior Art with Only a Slight Difference, the Unmodified Sequences, Alternately Modified Sequences and Sequences Modified with Specific Modification Templates of the Present Disclosure Significantly Improved the Inhibition Rate Against PCSK9 Gene, which can be Increased by Up to 40%.

[0486] Compared with the sequences disclosed in the prior art with only a slight difference, the unmodified sequences, alternately modified sequences and sequences modified with specific modification templates of the present disclosure significantly improved the inhibition rate against PCSK9 gene. For example, the inhibition rate of the unmodified sequence 31P was 38.3%. The inhibition rate of the similar unmodified sequence si31 of the present disclosure was 48.7%, which was 10.4% higher than 31P. The inhibition rate of the alternately modified sequence was 59.5%, which was 21.2% higher than 31P. After modification with the modification template DV26 of the present disclosure, the inhibition rate reached 80.2%, which was 41.9% higher than 31P.

TABLE 30
Inhibition rate against the PCSK9 gene by sequences of the present disclosure similar to those in the prior art

| | | Unmodified sequence | | | Alternately modified | | | Template-modified | | |
|---|---|---|---|---|---|---|---|---|---|---|
| | | of the present | | | sequence of the present | | | sequence of the present | | |
| | | disclosure | | | disclosure | | | disclosure | | |
| | | | | Increase (%) | | | Increase (%) | | | Increase (%) |
| | | | | compared | | | compared | | | compared |
| Sequences | | | | with | | | with | | | with |
| disclosed in | | | | sequences | | | sequences | | | sequences |
| the prior art | | | | disclosed | | | disclosed | | | disclosed |
| | Inhibition | Sequence | Inhibition | in the | Sequence | Inhibition | in the | Sequence | Inhibition | in the |
| Name | rate (%) | No. | rate (%) | prior art | No. | rate (%) | prior art | No. | rate (%) | prior art |
| 5P | 41.8 | si5 | 50.1 | 8.3 | P92-si5 | 63.8 | 22.0 | P92-si5-DV25 | 81.2 | 39.4 |
| | | | | | | | | P92-si5-DV26 | 81.5 | 39.7 |
| | | | | | | | | P92-si5-DV27 | 82.6 | 40.8 |
| | | | | | | | | P92-si5-DV28 | 77.0 | 35.2 |
| | | | | | | | | P92-si5-DV29 | 76.1 | 34.3 |
| 82P | 46.7 | si82 | 53.8 | 7.1 | P92-si82 | 68.3 | 21.6 | P92-si82-DV25 | 82.1 | 35.4 |
| | | | | | | | | P92-si82-DV26 | 84.2 | 37.5 |
| | | | | | | | | P92-si82-DV27 | 88.0 | 41.3 |
| | | | | | | | | P92-si82-DV28 | 86.7 | 40.0 |
| | | | | | | | | P92-si82-DV29 | 89.5 | 42.8 |
| 31P | 38.3 | si31 | 48.7 | 10.4 | P92-si31 | 59.5 | 21.2 | P92-si31-DV25 | 79.6 | 41.3 |
| | | | | | | | | P92-si31-DV26 | 80.2 | 41.9 |
| | | | | | | | | P92-si31-DV27 | 70.0 | 31.7 |
| | | | | | | | | P92-si31-DV28 | 73.9 | 35.6 |
| | | | | | | | | P92-si31-DV29 | 70.8 | 32.5 |

### I. Sequence Comparison

[0487] The sequences 5P, 31P and 82P disclosed in the prior art in Table 30 are very similar to the sequences si5, si31 and si82 of the present disclosure, with only slight differences. The specific comparison is shown in the table below:

TABLE 31
Comparison of sequences disclosed in the prior art
and sequences of the present disclosure

| | | Basic | | Basic | |
|---|---|---|---|---|---|
| | | sequence | | sequence | |
| | | SEQ ID | Antisense | SEQ ID | |
| Name | Sense strand | NO: | strand | NO: | Source |
| 5P | AAGAUCCUGCA | 1 | AUGGAAGACAU | 417 | WO2023/01700 |
| | UGUCUUCCAU | | GCAGGAUCUU | | 4 A1 |
| si5 | AAGAUCCUGCA | 1 | AUGGAAGACAU | 13 | Designed in the |
| | UGUCUUCCAU | | GCAGGAUCUUG | | present |
| | | | G | | disclosure |
| 31P | GGUCUGGAAU | 10 | CUUGACUUUGC | 419 | Page 25, |
| | GCAAAGUCAAG | | AUUCCAGACC | | CN115066498 |
| | | | | | A |
| si31 | GGUCUGGAAU | 10 | CUUGACUUUGC | 22 | Designed in the |
| | GCAAAGUCAAG | | AUUCCAGACCUG | | present |
| | | | | | disclosure |
| 82P | GAAGAUAUUU | 4 | AAACCCAGAAU | 418 | WO2023/01700 |
| | AUUCUGGGUU | | AAAUAUCUUC | | 4 A1 |
| | U | | | | |
| si82 | GAAGAUAUUU | 4 | AAACCCAGAAU | 16 | Designed in the |
| | AUUCUGGGUU | | AAAUAUCUUCA | | present |
| | U | | A | | disclosure |

[0488] It can be seen from Table 31 that sequence 5P disclosed in the prior art differs from sequence si5 of the present disclosure only in 2 missing bases GG at the 3′-end of the antisense chain; sequence 31P differs from sequence si31 of the present disclosure only in 2 missing bases UG at the 3′-end of the antisense; sequence 82P differs from sequence si82 of the present disclosure only in 2 missing bases AA at the 3′-end of the antisense; and the remaining bases are identical.

### II. Activity Comparison

1) the Unmodified Sequences of the Present Disclosure Significantly Improved the Activity Compared with the Similar Unmodified Sequences Disclosed in the Prior Art. For Example, the Unmodified Sequence Si31 of the Present Disclosure Improved the Inhibition Rate by 10.4% Compared with 31P with a Similar Structure.

[0489] The inhibition rate against PCSK9 gene of the unmodified sequence si5 in the present disclosure was 50.1%, which was 8.3% higher than the similar sequence 5P (inhibition rate of 41.8%) disclosed in the prior art, indicating a significant improvement.

[0490] The inhibition rate against PCSK9 gene of the unmodified sequence si82 in the present disclosure was 53.8%, which was 7.1% higher than the similar sequence 82P (inhibition rate of 46.7%) disclosed in the prior art, indicating a significant improvement.

[0491] The inhibition rate against PCSK9 gene of the unmodified sequence si31 in the present disclosure was 48.7%, which was 10.4% higher than the similar sequence 31P (inhibition rate of 38.3%) disclosed in the prior art, indicating a significant improvement.

2) the Alternately Modified Sequences of the Present Disclosure Significantly Improved the Activity Compared with the Similar Unmodified Sequences Disclosed in the Prior Art. For Example, the Alternately Modified Sequence P92-si5 of the Present Disclosure Improved the Inhibition Rate by 22.0% Compared with Sequence 5P.

[0492] After alternate modification on the basic sequence 5 of the present disclosure, the inhibition rate against PCSK9 gene by P92-si5 was 63.8%, which was 22.0% higher than the unmodified sequence 5P disclosed in the prior art, indicating a significant improvement.

[0493] After alternate modification on the basic sequence 82 of the present disclosure, the inhibition rate against PCSK9 gene by P92-si82 was 68.3%, which was 21.6% higher than the unmodified sequence 82P disclosed in the prior art, indicating a significant improvement.

[0494] After alternate modification on the basic sequence 31 of the present disclosure, the inhibition rate against PCSK9 gene by P92-si31 was 59.5%, which was 21.2% higher than the unmodified sequence 31P disclosed in the prior art, indicating a significant improvement.

3) the Sequences Modified with the Modification Templates of the Present Disclosure Significantly Improved the Activity Compared with the Similar Unmodified Sequences Disclosed in the Prior Art. For Example, the Alternately Modified Sequence

[0495] P92-si82-DV29 of the present disclosure improved the inhibition rate by 42.8% compared with sequence 82P.

[0496] After modification on basic sequence 5 with modification templates 25-29 of the present disclosure, the inhibition rate can be increased by more than 30% compared with the unmodified sequence 5P disclosed in the prior art. For example, there was an increase in 40.8% by P92-si5-DV27, indicating a significant improvement.

[0497] After modification on basic sequence 82 with modification templates 25-29 of the present disclosure, the inhibition rate can be increased by more than 30% compared with the unmodified sequence 82P disclosed in the prior art. For example, there was an increase in 42.8% by P92-si82-DV29, indicating a significant improvement.

[0498] After modification on basic sequence 31 with modification templates 25-29 of the present disclosure, the inhibition rate can be increased by more than 30% compared with the unmodified sequence 31P disclosed in the prior art. For example, there was an increase in 41.9% by P92-si31-DV26, indicating a significant improvement.

[0499] It can be concluded that compared with the similar unmodified sequences disclosed in the prior art, the unmodified sequences, the alternately modified sequences and the template-modified sequences of the present disclosure can significantly enhance the inhibitory activity against PCSK9, and the inhibition rate can be increased by up to 40%.

### SUMMARY

[0500] (1) Compared with the identical sequences disclosed in the prior art, the alternately modified sequences and the sequences modified using specific modification templates in the present disclosure significantly improved the inhibition rate against PCSK9 gene. For example, the inhibition rate of the unmodified sequence si84 was 38.6%. The inhibition rate after alternate modification was 61.6%, which was 23.0% higher than the unmodified sequence si84, and the inhibition rate after modification with the modification template DV26 of the present disclosure reached 86.8%, which was 48.2% higher than the unmodified sequence.

[0501] (2) Compared with similar sequences disclosed in the prior art, the unmodified sequences, alternately modified sequences and modified sequences using specific modification templates in the present disclosure significantly improve the inhibitory effect on the PCSK9 gene. For example, the unmodified sequence si31 of the present disclosure improved the inhibition rate by 10.4% compared with 31P with a similar sequence disclosed in the prior art. The alternately modified sequence P92-si5 of the present disclosure improved the inhibition rate by 22.0% compared with sequence 5P with a sequence disclosed in the prior art similar to sequence si5. The sequence P92-si82-DV29 modified on sequence si82 of the present disclosure with the modification template DV29 of the present disclosure improved the inhibition rate by 42.8% compared with the unmodified sequence 82P with a sequence disclosed in the prior art similar to sequence si82.

### Example 6: Inhibitory Effects on PCSK9 and Off-Target Genes by Specific Sequences Designed to Prevent Off-Target Genes

[0502] In the practical application of siRNA, there are a large number of cases where the expression of non-target mRNA that is only partially complementary to the guide strand (antisense strand) is inhibited. Alnylam's research shows that hepatotoxicity of n-acetylgalactosamine (GalNAc)-conjugated siRNA is mainly attributed to off-target effects resulting in gene suppression of the wrong target through a microRNA (miRNA)-like recognition mechanism.

[0503] To solve this problem, in the latest fifth-generation template design, Alnylam has used a glycol nucleic acid (GNA) modification at position 7 of the siRNA antisense strand to disrupt the seed region of the antisense strand, thereby significantly reducing off-target effects and alleviating hepatotoxicity. Such modifications can affect the way siRNA binds to non-designed targets through seed region recognition and inhibit off-target effects.

[0504] Natural 5′-end phosphorylation or simple direct 5′-end phosphorylation may be dephosphorylated in cells. Direct 5′-end phosphorylated oligonucleotide chains can be dephosphorylated by 90% after circulating in the blood for 2 hours and completely disappear after 24 hours. 5′-end phosphorylation design (5′-E-VP) uses E-vinyl phosphonate to replace the bridging oxygen, which has the best phosphorylation effect and high stability.

[0505] In summary, in order to reduce the off-target effect of the sequence and examine the effect of 5′-end phosphorylation on the off-target effect, the basic sequences 5, 51, 81 and 84 modified with DV25-29 were used in this example, and 5′-E-VP modification and GNA anti-off-target modification at position 7 were added to the 5′-end of the antisense strand.

[0506] Moreover, comparison was conducted between the sequences P92-si3, P92-si8, P92-si21, P92-si31, P92-si73 and P92-si83 modified alternately with 2′-methoxy and 2′-fluoro, and sequences P92-si3+, P92-si8+, P92-si21+, P92-si31+, P92-si73+ and P92-si83+, which were the above sequences but contained GNA anti-off-target modification at position 7 of the antisense chain, in order to detect off-target effects.

[0507] Experimental results show that at a concentration of 10 nM, the sequences with the off-target design had a significant inhibitory effect on the target gene PCSK9, and the inhibitory effect on off-target genes was significantly reduced. It demonstrates that the use of anti-off-target design will not affect the inhibitory effect of the alternately modified and template-modified sequences of the present disclosure on the PCSK9 gene, but can also significantly inhibit the off-target effect.

### 1. Experimental Materials

### 1) Test Samples:

[0508] Alternately modified sequences: sequences P92-si3, P92-si8, P92-si9, P92-si21, P92-si31, P92-si73 and P92-si83 with alternate modification.

[0509] Sequences with alternate modification and anti-off-target design: P92-si3+, P92-si8+, P92-si9+, P92-si21+, P92-si31+, P92-si73+ and P92-si83+ (Table 32).

[0510] Sequences obtained by modifying basic sequences 5, 84, 81 and 51 with template modification, with template modification and 5′-E-VP modification, with template modification and anti-off-target design, and with template modification, 5′-E-VP modification and anti-off-target design (Table 33).

### 2) Sequence Synthesis:

### I. Alternately Modified Sequences and Template-Modified Sequences

[0511] The synthesis method refers to Example 1.

II. siRNA Sequences Containing 5′-E-VP

[0512] Referring to Example 1, the siRNA sequence was synthesized. When synthesizing the base at the 5′-end of the antisense strand (the last base), a monomer containing a phosphonate group at the 5′-end was used, for example, vinyl-(E)-phosphonate-A-OMe phosphoramidite monomer (Formula 9), vinyl-(E)-phosphonate-U-OMe phosphoramidite monomer (Formula 10), which have the following structures:

[chemical structure]

II. siRNA Sequences with Anti-Off-Target Design

[0513] Referring to Example 1, the siRNA sequence was synthesized. When synthesizing the 7th base at the 5′-end of the antisense strand, GNA monomers were used to synthesize the sequence, which have the following structures:

[chemical structure]

TABLE 32
Sequences with alternative modification and anti-off-target modification

| | | Modified | | Modified |
|---|---|---|---|---|
| | | sequence | | sequence |
| | | SEQ ID | | SEQ ID |
| | | NO:/ | | NO:/ |
| | | Corres- | | Corres- |
| | | ponding | | ponding |
| | | basic | | basic |
| | | sequence | | sequence |
| Sequence | | SEQ ID | | SEQ ID |
| No. | Sense strand 5′-3′ | NO: | Antisense strand 5′-3′ | NO: |
| P92-si3+ | Cfs-Ams-Cf-Cm-Af-Am-Gf-A | 174/6 | Ams-Afs-Gm-Af-Cm-Af-Ugna-Gf- | 420/18 |
| | m-Uf-Cm-Cf-Um-Gf-Cm-Af- | | Cm-Af-Gm-Gf-Am-Uf-Cm-Uf-Um- | |
| | Um-Gf-Um-Cf-Um-Uf | | Gf-Gm-Uf-Gms-Afs-Gm | |
| P92-si8+ | Cfs-Ums-Cf-Am-Uf-Am-Gf-G | 175/7 | Ams-Afs-Um-Af-Am-Af-Cgna-Uf- | 421/19 |
| | m-Cf-Cm-Uf-Gm-Gf-Am-Gf- | | Cm-Cf-Am-Gf-Gm-Cf-Cm-Uf-Am- | |
| | Um-Uf-Um-Af-Um-Uf | | Uf-Gm-Af-Gms-Gfs-Gm | |
| P92-si9+ | Gfs-Gms-Cf-Cm-Uf-Gm-Gf-A | 176/8 | Ums-Ufs-Um-Cf-Cm-Gf-Agna-Af- | 422/20 |
| | m-Gf-Um-Uf-Um-Af-Um-Uf- | | Um-Af-Am-Af-Cm-Uf-Cm-Cf-Am- | |
| | Cm-Gf-Gm-Af-Am-Af | | Gf-Gm-Cf-Cms-Ufs-Am | |
| P92-si21+ | Cfs-Ams-Gf-Cm-Af-Cm-Cf-U | 177/9 | Ums-Gfs-Um-Gf-Am-Cf-Agna-Cf- | 423/21 |
| | m-Gf-Cm-Uf-Um-Uf-Gm-Uf- | | Am-Af-Am-Gf-Cm-Af-Gm-Gf-Um- | |
| | Gm-Uf-Cm-Af-Cm-Af | | Gf-Cm-Uf-Gms-Cfs-Am | |
| P92-si31+ | Gfs-Gms-Uf-Cm-Uf-Gm-Gf-A | 178/10 | Cms-Ufs-Um-Gf-Am-Cf-Ugna-Uf- | 424/22 |
| | m-Af-Um-Gf-Cm-Af-Am-Af- | | Um-Gf-Cm-Af-Um-Uf-Cm-Cf-Am- | |
| | Gm-Uf-Cm-Af-Am-Gf | | Gf-Am-Cf-Cms-Ufs-Gm | |
| P92-si73+ | Gfs-Cms-Gf-Gm-Af-Gm-Af-U | 179/11 | Ams-Ufs-Gm-Cf-Cm-Uf-Ugna-Af- | 425/23 |
| | m-Gf-Cm-Uf-Um-Cf-Um-Af- | | Gm-Af-Am-Gf-Cm-Af-Um-Cf-Um- | |
| | Am-Gf-Gm-Cf-Am-Uf | | Cf-Cm-Gf-Cms-Cfs-Am | |
| P92-si83+ | Gfs-Gms-Gf-Um-Uf-Um-Uf-G | 180/12 | Ams-Afs-Um-Af-Am-Af-Agna-Af- | 426/24 |
| | m-Uf-Am-Gf-Cm-Af-Um-Uf- | | Um-Gf-Cm-Uf-Am-Cf-Am-Af-Am- | |
| | Um-Uf-Um-Af-Um-Uf | | Af-Cm-Cf-Cms-Afs-Gm | |

[0514] The above sequences all adopted the scheme of alternate modification of 2′-methoxy (2′-OMe) and 2′-fluoro (2′-F), wherein:
[0515] (1) the nucleotides in the sense strand were modified with 2′-F in odd-numbered positions and with 2′-OMe in even-numbered positions;
[0516] (2) the nucleotides in the antisense strand were modified with 2′-OMe in odd-numbered positions and with 2′-F in even-numbered positions;
[0517] (3) the 5′-end of the sense strand and both the 5′- and 3′-ends of the antisense strand were each modified with two thio-modifications;
[0518] (4) the 7th base of the antisense strand (5′-3′ direction) was modified with GNA.

TABLE 33
Sequences with template modification, 5′-E-VP modification,
and anti-off-target design

| | | Modified | | Modified |
|---|---|---|---|---|
| | | sequence | | sequence |
| | | SEQ ID | | SEQ ID |
| | | NO:/ | | NO:/ |
| | | Corres- | | Corres- |
| | | ponding | | ponding |
| | | basic | | basic |
| | | sequence | | sequence |
| Sequence | | SEQ | | SEQ |
| No. | Sense strand 5′-3′ | ID NO: | Antisense strand 5′-3′ | ID NO: |
| D5- | Ams-Ams-Gm-Am-Um-Cm-Cf-U | 337/1 | Ams-Ufs-Gm-Gm-Am-Af-Gm-Am-Cm-A | 376/13 |
| DV25 | m-Gf-Cf-Af-Um-Gm-Um-Cm-Um- | | m-Um-Gm-Cm-Af-Gm-Gf-Am-Um-Cm- | |
| | Uf-Cm-Cm-Am-Um | | Um-Ums-Gms-Gm | |
| D5- | Ams-Ams-Gm-Am-Um-Cm-Cf-U | 337/1 | Ams-Ufs-Gm-Gm-Am-Af-Ggna-Am-Cm- | 427/13 |
| DV25+ | m-Gf-Cf-Af-Um-Gm-Um-Cm-Um- | | Am-Um-Gm-Cm-Af-Gm-Gf-Am-Um-Cm- | |
| | Uf-Cm-Cm-Am-Um | | Um-Ums-Gms-Gm | |
| D5- | Ams-Ams-Gm-Am-Um-Cm-Cf-U | 337/1 | AmsEVP-Ufs-Gm-Gm-Am-Af-Gm-Am-C | 428/13 |
| DV25P | m-Gf-Cf-Af-Um-Gm-Um-Cm-Um- | | m-Am-Um-Gm-Cm-Af-Gm-Gf-Am-Um- | |
| | Uf-Cm-Cm-Am-Um | | Cm-Um-Ums-Gms-Gm | |
| D5- | Ams-Ams-Gm-Am-Um-Cm-Cf-U | 337/1 | AmsEVP-Ufs-Gm-Gm-Am-Af-Ggna-Am- | 429/13 |
| DV25+ | m-Gf-Cf-Af-Um-Gm-Um-Cm-Um- | | Cm-Am-Um-Gm-Cm-Af-Gm-Gf-Am-Um- | |
| P | Uf-Cm-Cm-Am-Um | | Cm-Um-Ums-Gms-Gm | |
| D51- | Ums-Gms-Gm-Am-Gm-Gm-Cf-U | 342/2 | Ams-Ufs-Cf-Cf-Am-Gf-Am-Am-Am-Gm- | 381/14 |
| DV26 | m-Uf-Af-Gf-Cm-Um-Um-Um-Cm- | | Cm-Um-Am-Af-Gm-Cf-Cm-Um-Cm-Cm- | |
| | Uf-Gm-Gm-Am-Um | | Ams-Ums-Um | |
| D51- | Ums-Gms-Gm-Am-Gm-Gm-Cf-U | 342/2 | Ams-Ufs-Cf-Cf-Am-Gf-Agna-Am-Am-G | 430/14 |
| DV26+ | m-Uf-Af-Gf-Cm-Um-Um-Um-Cm- | | m-Cm-Um-Am-Af-Gm-Cf-Cm-Um-Cm-C | |
| | Uf-Gm-Gm-Am-Um | | m-Ams-Ums-Um | |
| D51- | Ums-Gms-Gm-Am-Gm-Gm-Cf-U | 342/2 | AmsEVP-Ufs-Cf-Cf-Am-Gf-Am-Am-Am- | 431/14 |
| DV26P | m-Uf-Af-Gf-Cm-Um-Um-Um-Cm- | | Gm-Cm-Um-Am-Af-Gm-Cf-Cm-Um-Cm- | |
| | Uf-Gm-Gm-Am-Um | | Cm-Ams-Ums-Um | |
| D51- | Ums-Gms-Gm-Am-Gm-Gm-Cf-U | 342/2 | AmsEVP-Ufs-Cf-Cf-Am-Gf-Agna-Am-A | 432/14 |
| DV26+ | m-Uf-Af-Gf-Cm-Um-Um-Um-Cm- | | m-Gm-Cm-Um-Am-Af-Gm-Cf-Cm-Um-C | |
| P | Uf-Gm-Gm-Am-Um | | m-Cm-Ams-Ums-Um | |
| D81- | Cms-Ums-Um-Um-Um-Gm-Uf-A | 347/3 | Ams-Afs-Um-Am-Um-Cf-Um-Um-Cm-A | 384/15 |
| DV25 | m-Af-Cf-Uf-Um-Gm-Am-Am-Gm- | | m-Am-Gm-Um-Uf-Am-Cf-Am-Am-Am- | |
| | Af-Um-Am-Um-Um | | Am-Gms-Cms-Am | |
| D81- | Cms-Ums-Um-Um-Um-Gm-Uf-A | 347/3 | Ams-Afs-Um-Am-Um-Cf-Ugna-Um-Cm- | 433/15 |
| DV25+ | m-Af-Cf-Uf-Um-Gm-Am-Am-Gm- | | Am-Am-Gm-Um-Uf-Am-Cf-Am-Am-Am- | |
| | Af-Um-Am-Um-Um | | Am-Gms-Cms-Am | |
| D81- | Cms-Ums-Um-Um-Um-Gm-Uf-A | 347/3 | AmsEVP-Afs-Um-Am-Um-Cf-Um-Um-C | 434/15 |
| DV25P | m-Af-Cf-Uf-Um-Gm-Am-Am-Gm- | | m-Am-Am-Gm-Um-Uf-Am-Cf-Am-Am- | |
| | Af-Um-Am-Um-Um | | Am-Am-Gms-Cms-Am | |
| D81- | Cms-Ums-Um-Um-Um-Gm-Uf-A | 347/3 | AmsEVP-Afs-Um-Am-Um-Cf-Ugna-Um- | 435/15 |
| DV25+ | m-Af-Cf-Uf-Um-Gm-Am-Am-Gm- | | Cm-Am-Am-Gm-Um-Uf-Am-Cf-Am-Am- | |
| P | Af-Um-Am-Um-Um | | Am-Am-Gms-Cms-Am | |
| D81- | Cms-Ums-Um-Um-Um-Gm-Uf-A | 347/3 | Ams-Afs-Um-Af-Uf-Cf-Um-Um-Cm-Am- | 386/15 |
| DV27 | m-Af-Cf-Uf-Um-Gm-Am-Am-Gm- | | Am-Gm-Um-Uf-Am-Cf-Am-Am-Am-Am- | |
| | Af-Um-Am-Um-Um | | Gms-Cms-Am | |
| D81- | Cms-Ums-Um-Um-Um-Gm-Uf-A | 347/3 | Ams-Afs-Um-Af-Uf-Cf-Ugna-Um-Cm-A | 436/15 |
| DV27+ | m-Af-Cf-Uf-Um-Gm-Am-Am-Gm- | | m-Am-Gm-Um-Uf-Am-Cf-Am-Am-Am- | |
| | Af-Um-Am-Um-Um | | Am-Gms-Cms-Am | |
| D81- | Cms-Ums-Um-Um-Um-Gm-Uf-A | 347/3 | AmsEVP-Afs-Um-Af-Uf-Cf-Um-Um-Cm- | 437/15 |
| DV27P | m-Af-Cf-Uf-Um-Gm-Am-Am-Gm- | | Am-Am-Gm-Um-Uf-Am-Cf-Am-Am-A | |
| | Af-Um-Am-Um-Um | | m-Am-Gms-Cms-Am | |
| D81- | Cms-Ums-Um-Um-Um-Gm-Uf-A | 347/3 | AmsEVP-Afs-Um-Af-Uf-Cf-Ugna-Um-C | 438/15 |
| DV27+ | m-Af-Cf-Uf-Um-Gm-Am-Am-Gm- | | m-Am-Am-Gm-Um-Uf-Am-Cf-Am-Am- | |
| P | Af-Um-Am-Um-Um | | Am-Am-Gms-Cms-Am | |
| D81- | Cms-Ums-Um-Um-Um-Gm-Uf-A | 348/3 | Ams-Afs-Uf-Af-Um-Cf-Um-Um-Cm-Am- | 385/15 |
| DV28 | m-Af-Cm-Uf-Um-Gm-Am-Am-Gm | | Am-Gm-Um-Uf-Am-Cf-Am-Am-Am-Am- | |
| | -Af-Um-Am-Um-Um | | Gms-Cms-Am | |
| D81- | Cms-Ums-Um-Um-Um-Gm-Uf-A | 348/3 | Ams-Afs-Uf-Af-Um-Cf-Ugna-Um-Cm-A | 439/15 |
| DV28+ | m-Af-Cm-Uf-Um-Gm-Am-Am-Gm | | m-Am-Gm-Um-Uf-Am-Cf-Am-Am-Am- | |
| | -Af-Um-Am-Um-Um | | Am-Gms-Cms-Am | |
| D81- | Cms-Ums-Um-Um-Um-Gm-Uf-A | 348/3 | AmsEVP-Afs-Uf-Af-Um-Cf-Um-Um-Cm- | 440/15 |
| DV28P | m-Af-Cm-Uf-Um-Gm-Am-Am-Gm | | Am-Am-Gm-Um-Uf-Am-Cf-Am-Am-A | |
| | -Af-Um-Am-Um-Um | | m-Am-Gms-Cms-Am | |
| D81- | Cms-Ums-Um-Um-Um-Gm-Uf-A | 348/3 | AmsEVP-Afs-Uf-Af-Um-Cf-Ugna-Um-C | 441/15 |
| DV28+ | m-Af-Cm-Uf-Um-Gm-Am-Am-Gm | | m-Am-Am-Gm-Um-Uf-Am-Cf-Am-Am- | |
| P | -Af-Um-Am-Um-Um | | Am-Am-Gms-Cms-Am | |
| D84- | Gms-Ums-Um-Um-Um-Gm-Uf-A | 357/5 | Ums-Ufs-Af-Af-Um-Af-Am-Am-Am-Am- | 393/17 |
| DV26 | m-Gf-Cf-Af-Um-Um-Um-Um-Um- | | Um-Gm-Cm-Uf-Am-Cf-Am-Am-Am-A | |
| | Af-Um-Um-Am-Am | | m-Cms-Cms-Cm | |
| D84- | Gms-Ums-Um-Um-Um-Gm-Uf-A | 357/5 | Ums-Ufs-Af-Af-Um-Af-Agna-Am-Am-A | 442/17 |
| DV26+ | m-Gf-Cf-Af-Um-Um-Um-Um-Um- | | m-Um-Gm-Cm-Uf-Am-Cf-Am-Am-Am- | |
| | Af-Um-Um-Am-Am | | Am-Cms-Cms-Cm | |
| D84- | Gms-Ums-Um-Um-Um-Gm-Uf-A | 357/5 | UmsEVP-Ufs-Af-Af-Um-Af-Am-Am-Am- | 443/17 |
| DV26P | m-Gf-Cf-Af-Um-Um-Um-Um-Um- | | Am-Um-Gm-Cm-Uf-Am-Cf-Am-Am-A | |
| | Af-Um-Um-Am-Am | | m-Am-Cms-Cms-Cm | |
| D84- | Gms-Ums-Um-Um-Um-Gm-Uf-A | 357/5 | UmsEVP-Ufs-Af-Af-Um-Af-Agna-Am-A | 444/17 |
| DV26+ | m-Gf-Cf-Af-Um-Um-Um-Um-Um- | | m-Am-Um-Gm-Cm-Uf-Am-Cf-Am-Am- | |
| P | Af-Um-Um-Am-Am | | Am-Am-Cms-Cms-Cm | |
| D84- | Gms-Ums-Um-Um-Um-Gm-Uf-A | 357/5 | Ums-Ufs-Am-Af-Uf-Af-Am-Am-Am-Am- | 394/17 |
| DV27 | m-Gf-Cf-Af-Um-Um-Um-Um-Um- | | Um-Gm-Cm-Uf-Am-Cf-Am-Am-Am-A | |
| | Af-Um-Um-Am-Am | | m-Cms-Cms-Cm | |
| D84- | Gms-Ums-Um-Um-Um-Gm-Uf-A | 357/5 | Ums-Ufs-Am-Af-Uf-Af-Agna-Am-Am-A | 445/17 |
| DV27+ | m-Gf-Cf-Af-Um-Um-Um-Um-Um- | | m-Um-Gm-Cm-Uf-Am-Cf-Am-Am-Am- | |
| | Af-Um-Um-Am-Am | | Am-Cms-Cms-Cm | |
| D84- | Gms-Ums-Um-Um-Um-Gm-Uf-A | 357/5 | UmsEVP-Ufs-Am-Af-Uf-Af-Am-Am-Am- | 446/17 |
| DV27P | m-Gf-Cf-Af-Um-Um-Um-Um-Um- | | Am-Um-Gm-Cm-Uf-Am-Cf-Am-Am-A | |
| | Af-Um-Um-Am-Am | | m-Am-Cms-Cms-Cm | |
| D84- | Gms-Ums-Um-Um-Um-Gm-Uf-A | 357/5 | UmsEVP-Ufs-Am-Af-Uf-Af-Agna-Am-A | 447/17 |
| DV27+ | m-Gf-Cf-Af-Um-Um-Um-Um-Um- | | m-Am-Um-Gm-Cm-Uf-Am-Cf-Am-Am- | |
| P | Af-Um-Um-Am-Am | | Am-Am-Cms-Cms-Cm | |

[0519] Cell type: Hep3B cells, provided by Shanghai WuXi AppTec New Drug Development Co., Ltd. (ATCC-tings-1618164).

[0520] Hep3B cells were cultured in EMEM medium (ATCC-30-2003) containing 10% fetal bovine serum (FBS, ExCell Bio-FSP500), 1% penicillin-streptomycin (HyClone-SV30010), 1% non-essential amino acid solution (Gibco-11140-050), and 1% GlutaMAX supplement (Gibco-35050-061).

[0521] Drug solvent: DNase/RNase-free water, Gibco DMEM.

### 2. Experimental Methods

### 1) Compound Dilution

[0522] For off-target experiments, the test samples were diluted to a concentration of 10 nM and tested in triplicate wells.

### Digestion and Count of Hep3B Cells:

[0523] Hep3B cells with a density of 80% were taken out, rinsed with Dulbecco's phosphate buffered saline (DPBS), and digested with 0.05% trypsin for 3-10 min. After the cells were collected, they were counted with Countstar Rigel S2 and the cell density was adjusted to 2×10⁵/mL.

### 2) Preparation of Transfection Reagent

[0524] RNAiMAX transfection reagent was prepared. The appropriate volume prepared in a 15 mL centrifuge tube at a ratio of RNAiMAX:Opti-MEM=3:97, mixed well by vortex for 15 sec, and incubated at room temperature for 15 min. 40 μL RNAiMAX Opti-MEM was added to each well at the corresponding position, and 40 μL of the diluted compound of the corresponding concentration was added to the corresponding well of the dilution plate, mixed well and incubated for 15 min.

### 3) Cell Plating

[0525] Hep3B cells (2×10⁴ cells/well) were plated into 96-well cell plates. The siRNA compounds were mixed with RNAiMAX Opti-MEM transfection reagent and added to the cells in each well. A control group without siRNA compounds containing RNAiMAX Opti-MEM was also set up.

[0526] Anti-off-target experiment: The mixture of compounds and RNAiMAX Opti-MEM was taken out from the dilution plate and added to a 96-well cell culture plate (20 μL/well). Then 100 μL/well cells were added to the 96-well plate, and the final volume per well was 120 μL. After plating, the plate was placed in a 5% CO₂, 37° C. incubator for 24 h.

### 4) RNA Extraction and Reverse Transcription

[0527] 24 h after transfection, the medium was removed and the cells were collected for RNA extraction. Total RNA was extracted using RNeasy® 96 Kit (QIAGEN-74182) according to the kit instructions. Subsequently, cDNA was synthesized using FastKing RT Kit (With gDNase) (TIANGEN-KR116-02) according to the instructions.

### 5) RT-qPCR

[0528] The target cDNA was detected by qPCR, and GAPDH cDNA was detected in parallel as an internal control. 8 μL of the prepared qPCR reaction solution and 2 μL of sample cDNA were added to 384 wells. The TaqMan qPCR reaction program included: heating at 95° C. for 10 min, and then entering the cycle mode of heating at 95° C. for 15 s and then 60° C. for 1 min, for a total of 40 cycles. The SYBR qPCR reaction program included: heating at 50° C. for 2 min, heating at 95° C. for 10 min, and then entering the cycle mode of heating at 95° C. for 15 sec and then 60° C. for 1 min, for a total of 40 cycles; and the final melting curve was heated at 95° C. for 15 sec, 60° C. for 1 min, and 95° C. for 15 sec.

### 6) Data Analysis

[0529] The RNA expression level of the target gene in the sample was calculated based on the Ct value of each sample using the ΔΔCt relative quantitative method. The relative expression of the target gene was expressed as 2-ΔΔCT.

[0530] The calculation formulas are as follows:

$$Δ CT = average Ct value of target gene - average Ct value of internal reference gene ;$$

$$ΔΔ CT = Δ CT ( medication group ) - Δ CT ( RNAiMAX control group ) ;$$

$$Relative expression level of target gene mRNA = 2 - ΔΔ CT$$

$$Inhibition rate = ( 1 - relative expression level of sample / average expression level of RNAiMAX control ) \times 100 \%$$

### 3. Experimental Results

[0531] (1) Different modified sequences exhibited a significant inhibitory effect on the PCSK9 gene. For example, the inhibition rate of alternately modified P92-si3 reached 75.6%, and the inhibition rate of sequence D84-DV27P with template modification and 5′-E-VP modification was as high as 94.4%.

[0532] The inhibition rates of all tested samples on the PCSK9 gene are shown in Tables 34-36.

[0533] All alternately modified sequences exhibited a significant inhibitory effect on PCSK9 at a concentration of 10 nM. For example, the inhibition rate of the alternately modified sequence P92-si3 reached 75.6%.

I. The Alternately Modified Sequence Exhibited a Significant Inhibitory Effect on the PCSK9 Gene, with the Inhibition Rate Exceeding 60%, Among which P92-si3 Reached 75.6%.

TABLE 34
Inhibition rate against the PCSK9 gene
by alternately modified sequences

| | Alternately modified | |
|---|---|---|
| Basic sequence NO. | sequence No. | Inhibition rate (%) |
| 3 | P92-si3 | 75.6 |
| 8 | P92-si8 | 74.0 |
| 9 | P92-si9 | 69.7 |
| 21 | P92-si21 | 67.3 |
| 31 | P92-si31 | 72.3 |
| 51 | P92-si51 | 70.1 |
| 73 | P92-si73 | 69.9 |
| 83 | P92-si83 | 66.5 |

[0534] As can be seen from the table above, at a concentration of 10 nM, the alternately modified sequences P92-si3, P92-si8, P92-si9, P92-si21, P92-si31, P92-si51, P92-si73 and P92-si83 all exhibited a significant inhibitory effect on the PCSK9 gene, with the inhibition rate exceeding 60%, among which P92-si3 had the highest inhibition rate, reaching 75.6%.

II. The Template-Modified Sequences with Anti-Off-Target Design or/and 5′-E-VP Modification Exhibited a Significant Inhibitory Effect on the PCSK9 Gene. For Example, the Inhibition Rate of Sequence D84-DV27P with Template Modification and 5′-E-VP Modification was as High as 94.4%.

TABLE 35
Inhibition rate against the PCSK9 gene by template-modified sequences
and anti-off-target design or/and 5′-E-VP modifications thereof

| Basic | Alternately | | |
|---|---|---|---|
| sequence | modified | | Inhibition |
| NO. | sequence No. | Modification method | rate (%) |
| 5 | D5-DV25 | Template modification | 87.2 |
| | D5-DV25+ | Template modification and | 82.2 |
| | | anti-off-target design | |
| | D5-DV25P | Template modification and | 87.9 |
| | | 5′-E-VP | |
| | D5-DV25 + P | Template modification, | 82.7 |
| | | anti-off-target design and | |
| | | 5′-E-VP | |
| 51 | D51-DV26 | Template modification | 90.7 |
| | D51-DV26+ | Template modification and | 87.2 |
| | | anti-off-target design | |
| | D51-DV26P | Template modification and | 91.8 |
| | | 5′-E-VP | |
| | D51-DV26 + P | Template modification, | 84.0 |
| | | anti-off-target design and | |
| | | 5′-E-VP | |
| 81 | D81-DV25 | Template modification | 92.6 |
| | D81-DV25+ | Template modification and | 88.1 |
| | | anti-off-target design | |
| | D81-DV25P | Template modification and | 93.3 |
| | | 5′-E-VP | |
| | D81-DV25 + P | Template modification, | 87.5 |
| | | anti-off-target design and | |
| | | 5′-E-VP | |
| 81 | D81-DV27 | Template modification | 93.0 |
| | D81-DV27+ | Template modification and | 86.5 |
| | | anti-off-target design | |
| | D81-DV27P | Template modification and | 93.7 |
| | | 5′-E-VP | |
| | D81-DV27 + P | Template modification, | 87.8 |
| | | anti-off-target design and | |
| | | 5′-E-VP | |
| 81 | D81-DV28 | Template modification | 90.7 |
| | D81-DV28+ | Template modification and | 89.2 |
| | | anti-off-target design | |
| | D81-DV28P | Template modification and | 91.6 |
| | | 5′-E-VP | |
| | D81-DV28 + P | Template modification, | 87.8 |
| | | anti-off-target design and | |
| | | 5′-E-VP | |
| 84 | D84-DV26 | Template modification | 92.0 |
| | D84-DV26+ | Template modification and | 90.1 |
| | | anti-off-target design | |
| | D84-DV26P | Template modification and | 93.1 |
| | | 5′-E-VP | |
| | D84-DV26 + P | Template modification, | 89.8 |
| | | anti-off-target design and | |
| | | 5′-E-VP | |
| 84 | D84-DV27 | Template modification | 91.5 |
| | D84-DV27+ | Template modification and | 89.2 |
| | | anti-off-target design | |
| | D84-DV27P | Template modification and | 94.4 |
| | | 5′-E-VP | |
| | D84-DV27 + P | Template modification, | 90.4 |
| | | anti-off-target design and | |
| | | 5′-E-VP | |

[0535] 1) After the basic sequences 5, 51, 81 and 84 were modified with the modification templates of the present disclosure, they exhibited a significant inhibitory effect on the PCSK9 gene, with an inhibition rate exceeding 90%. Moreover, the inhibitory effect was further enhanced compared to alternately modified sequences. For example, after the basic sequence 51 was alternately modified, the inhibition rate of P92-si51 was 70.1% (see Table 34). After modification with template DV26, the inhibition rate by D51-DV26 reached 90.7%, which was 20.6% higher than the alternately modified sequence, indicating a significantly improvement (FIG. 8).

[0536] 2) After template modification and then anti-off-target design, the sequences had a significant inhibitory activity on PCSK9 gene expression. For example, after the basic sequence 84 was modified with template DV26 and then with anti-off-target design, the inhibition rate by D84-DV26+ was as high as 90.1%.

[0537] 3) After template modification and then 5′-E-VP modification, the inhibitory effect on the PCSK9 gene can be enhanced. For example, after the basic sequence 84 was modified with template DV27, the inhibition rate by D84-DV27 was 91.5%. After further 5′-E-VP modification, the inhibition rate of D84-DV27P was 94.4%, which was increased by 2.9%.

[0538] 4) After template modification, anti-off-target design and 5′-E-VP modification, the inhibitory activity on the PCSK9 gene could reach more than 90%. For example, after the basic sequence 84 was modified with template DV27, anti-off-target and 5′-E-VP modification, the inhibition rate of D84-DV27+P could reach 90.4%.

[0539] It can be concluded that modification with modification templates DV25-29 of the present disclosure can further enhance the inhibitory effect compared to the alternately modified sequences. Moreover, modification with modification templates DV25-29 of the present disclosure and further anti-off-target design or/and 5′-E-VP modification achieved a significant inhibitory effect on PCSK9 gene expression, with an inhibition rate exceeding 90%.

(2) Modification with any One or More of the Various Modification Methods of the Present Disclosure and Further Anti-Off-Target Design Achieved a Significant Anti-Off-Target Effect on Off-Target Genes and Reduced the Inhibitory Effect on Off-Target Genes.

[0540] Experimental results show that:
[0541] 1) The alternately modified or template-modified sequences of the present disclosure with an anti-off-target design can reduce the inhibitory effect on off-target genes, indicating a significant anti-off-target effect;
[0542] 2) The template-modified sequences with both an anti-off-target design and 5′-E-VP modification significantly reduced the inhibition rate of off-target genes, indicating a significant anti-off-target effect.
   I. The Alternately Modified Sequences of the Present Disclosure with an Anti-Off-Target Design Exhibited a Significant Anti-Off-Target Effect and can Reduce the Inhibition Rate of Off-Target Genes by 20%.

TABLE 36
Inhibition rate of off-target genes by alternate modification
sequences and anti-off-target modifications thereof

| | | | | Reduction (%) in |
|---|---|---|---|---|
| | | | | inhibition rate |
| Basic | | | Average | compared with no |
| sequence | Sequence | Off-target | inhibition | anti-off-target |
| NO. | No. | gene | rate (%) | design |
| 3 | P92-si3 | AARSD1 | 43.5 | — |
| | P92-si3+ | | 23.5 | 20.0 |
| 3 | P92-si3 | ACAP2 | 56.0 | — |
| | P92-si3+ | | 35.5 | 20.5 |
| 8 | P92-si8 | AIFM2 | 17.3 | — |
| | P92-si8+ | | 10.1 | 7.2 |
| 31 | P92-si31 | ERG | 16.8 | — |
| | P92-si31+ | | 8.4 | 8.4 |
| 9 | P92-si9 | MACF1 | 24.9 | — |
| | P92-si9+ | | 20.1 | 4.8 |
| 8 | P92-si8 | RETREG2 | 14.1 | — |
| | P92-si8+ | | 8.2 | 5.9 |

[0543] As can be seen from Table 36, after the alternately modified sequences of the present disclosure adopted an anti-off-target design, the inhibition rate of off-target genes was reduced, indicating an anti-off-target effect. For example, the alternately modified sequence P92-si3+ with an anti-off-target design reduced the inhibition rate of the off-target gene AARSD1 by 20.0% and reduced the inhibition rate of the off-target gene ACAP2 by 20.5% compared with sequence P92-si3 with no anti-off-target design, indicating a significant reduction.

II. The Sequences Modified with the Modification Templates of the Present Disclosure with an Anti-Off-Target Design Exhibited a Significant Anti-Off-Target Effect and can Reduce the Inhibition Rate of Off-Target Genes by Up to 73.6%.

TABLE 37
Inhibition rate of off-target genes by template-modified sequences
and anti-off-target or/and 5′-E-VP modifications thereof

| | | | | Reduction (%) in |
|---|---|---|---|---|
| | | | Inhibition | inhibition rate |
| Basic | | Off- | rate of | compared with no |
| sequence | | target | off-target | anti-off-target |
| NO. | Sequence No. | gene | gene (%) | design |
| 5 | D5-DV25 | DTWD1 | 26.4 | 0 |
| | D5-DV25+ | | 15.5 | 10.9 |
| | D5-DV25P | | 40 | −13.6 |
| | D5-DV25 + P | | 18.7 | 7.7 |
| 51 | D51-DV26 | NEPRO | 37.8 | 0 |
| | D51-DV26+ | | 11.9 | 25.9 |
| | D51-DV26P | | 18.1 | 19.7 |
| | D51-DV26 + P | | −4.8 | 42.6 |
| 51 | D51-DV26 | KIF1B | 35.9 | 0 |
| | D51-DV26+ | | 13.1 | 22.8 |
| | D51-DV26P | | 24.8 | 11.1 |
| | D51-DV26 + P | | −5.7 | 41.6 |
| 81 | D81-DV25 | DSE | 56.2 | 0 |
| | D81-DV25+ | | 31.9 | 24.2 |
| | D81-DV25P | | 45.1 | 11.0 |
| | D81-DV25 + P | | 51.0 | 5.1 |
| | D81-DV27 | | 44.5 | 0 |
| | D81-DV27+ | | 23.7 | 20.8 |
| | D81-DV27P | | 43.7 | 0.7 |
| | D81-DV27 + P | | 29.6 | 14.9 |
| 81 | D81-DV25 | PCYOX1 | 64.1 | 0 |
| | D81-DV25+ | | 10.0 | 54.1 |
| | D81-DV25P | | 47.1 | 17.0 |
| | D81-DV25 + P | | 34.2 | 29.9 |
| | D81-DV27 | | 54.4 | 0 |
| | D81-DV27+ | | 17.0 | 37.4 |
| | D81-DV27P | | 58.0 | −3.6 |
| | D81-DV27 + P | | 23.3 | 31.1 |
| 84 | D84-DV26 | MXD1 | 69.3 | 0 |
| | D84-DV26+ | | 29.4 | 39.9 |
| | D84-DV26P | | 59.3 | 10.0 |
| | D84-DV26 + P | | −4.3 | 73.6 |
| | D84-DV27 | | 44.6 | 0 |
| | D84-DV27+ | | 28.1 | 16.5 |
| | D84-DV27P | | 49.1 | −4.5 |
| | D84-DV27 + P | | 37.2 | 7.4 |

### 1) Only Anti-Off-Target Design (Indicated by “+” in the Sequence Number)

[0544] After the template-modified sequences were modified with an anti-off-target design, the inhibitory effect on off-target genes was significantly reduced. For example, D84-DV26+ reduced the inhibition rate of the MXD1 gene by 39.9%, D81-DV25+ reduced the inhibition rate of the PCYOX1 gene by 54.1%, D51-DV26+ reduced the inhibition rate of the NEPRO gene by 25.9%, and D5-DV25+ reduced the inhibition rate of the DTWD1 gene by 10.9%.

[0545] It shows that after the basic sequences 5, 51, 81 and 84 were modified with the modification templates of the present disclosure and further an anti-off-target design, a significant anti-off-target effect was achieved.

### 2) Both Anti-Off-Target Design and 5′-E-VP Modification (Indicated by “+P” in the Sequence Number)

[0546] Sequences with both template modification and 5′-E-VP modification significantly reduced the inhibition rate of off-target genes, with a significant anti-off-target effect. For example, D84-DV26+P reduced the inhibition rate of the off-target gene MXD1 by 73.6%, D81-DV27+P reduced the inhibition rate of the off-target gene PCYOX1 by 31.1%, and D51-DV26+P reduced the inhibition rate of the off-target gene KIF1B by 41.6%, indicating a significant reduction.

[0547] It shows that after the basic sequences 5, 51, 81 and 84 were modified with the modification templates of the present disclosure and further an anti-off-target design and 5′-E-VP modification, a significant anti-off-target effect was achieved.

### SUMMARY

[0548] 1. Different modified sequences exhibited a significant inhibitory effect on the PCSK9 gene. For example, the inhibition rate of alternately modified P92-si3 reached 75.6%, and the inhibition rate of sequence D84-DV27P with template modification and 5′-E-VP modification was as high as 94.4%.

[0549] (1) The alternately modified sequence exhibited a significant inhibitory effect on the PCSK9 gene, with the inhibition rate exceeding 60%, among which P92-si3 reached 75.6%.

[0550] (2) The template-modified sequences with anti-off-target design or/and 5′-E-VP modification exhibited a significant inhibitory effect on the PCSK9 gene. For example, the inhibition rate of sequence D84-DV27P with template modification and 5′-E-VP modification was as high as 94.4%.

[0551] 2. Modification with any one or more of the various modification methods of the present disclosure and further anti-off-target design achieved a significant anti-off-target effect on off-target genes and reduced the inhibitory effect on off-target genes.

[0552] (1) The alternately modified sequences of the present disclosure with an anti-off-target design exhibited a significant anti-off-target effect and can reduce the inhibition rate of off-target genes by 20%.

[0553] (2) The sequences modified with the modification templates of the present disclosure with an anti-off-target design exhibited a significant anti-off-target effect and can reduce the inhibition rate of off-target genes by up to 73.6%.

### Example 7: Effects of Sequences Modified with the Modification Templates of the Present Disclosure on PCSK9, Low-Density Lipoprotein Cholesterol (LDL-C) and Total Cholesterol (TC) in Mouse Serum

[0554] This example exemplarily selected some sequences, including basic sequences 5, 51, 81, 82 and 84, which were modified, for example, with only template modification, with both template modification and an anti-off-target design, with both template modification and 5′-E-VP modification, or with template modification, 5′-E-VP modification and anti-off-target design simultaneously. Transgenic mice expressing the human PCSK9 gene were used to detect the inhibitory effects of each of the above sequences on PCSK9, low-density lipoprotein cholesterol (LDL-C) and total cholesterol (TC) in serum at different time points by ELISA.

### 1. Experimental Materials

### Test Drugs:

[0555] Each of the sequences in Table 38, including sequences with only template modification, with both template modification and an anti-off-target design, with both template modification and 5′-E-VP modification, or with template modification, 5′-E-VP modification and anti-off-target design simultaneously, which conjugated with GalNAc ligand G4, G5, G6 or G7 at the 3′-end of the sense strand.

[chemical structure]

[0556] The method for conjugating the oligonucleotide with the ligand G4, G5, G6 or G7 was the same as the preparation method of conjugate 4, conjugate 5, conjugate 6 and conjugate 7 in Example 3 of patent application CN116854754A, i.e., conjugating YK-GAL-304, YK-GAL-305, YK-GAL-306 and YK-GAL-307 with the oligonucleotides. The synthesis method of YK-GAL-304, YK-GAL-305, YK-GAL-306 and YK-GAL-307 was the same as Example 1 of this patent application.

[0557] The oligonucleotide and the ligand formed a conjugate as shown below:

[chemical structure]

[0558] The specific sequences of each sequence are shown in Table 38. G4, G5, G6 and G7 in the sequence number indicate that the sequence was conjugated with the GalNAc ligand G4, G5, G6 or G7.

TABLE 38
Sequences in animal experiments

| | | Modified | | Modified |
|---|---|---|---|---|
| | | sequence | | sequence |
| | | SEQ ID | | SEQ ID |
| | | NO:/ | | NO:/ |
| | | Corres- | | Corres- |
| | | ponding | | ponding |
| | | basic | | basic |
| | | sequence | | sequence |
| Sequence | | SEQ ID | | SEQ ID |
| No. | Sense strand 5′-3′ | NO: | Antisense strand 5′-3′ | NO: |
| D5-D | Ams-Ams-Gm-Am-Um-Cm-Cf-Um- | 337/1 | Ams-Ufs-Gm-Gm-Am-Af-Ggna-Am-Cm- | 427/13 |
| V25+ | Gf-Cf-Af-Um-Gm-Um-Cm-Um-Uf-C | | Am-Um-Gm-Cm-Af-Gm-Gf-Am-Um-Cm- | |
| G4 | m-Cm-Am-Um-G4 | | Um-Ums-Gms-Gm | |
| D5-D | Ams-Ams-Gm-Am-Um-Cm-Cf-Um- | 337/1 | Ams-Ufs-Gm-Gm-Am-Af-Ggna-Am-Cm- | 427/13 |
| V25+ | Gf-Cf-Af-Um-Gm-Um-Cm-Um-Uf-C | | Am-Um-Gm-Cm-Af-Gm-Gf-Am-Um-Cm- | |
| G7 | m-Cm-Am-Um-G7 | | Um-Ums-Gms-Gm | |
| D5-D | Ams-Ams-Gm-Am-Um-Cm-Cf-Um- | 337/1 | AmsEVP-Ufs-Gm-Gm-Am-Af-Gm-Am-C | 428/13 |
| V25P | Gf-Cf-Af-Um-Gm-Um-Cm-Um-Uf-C | | m-Am-Um-Gm-Cm-Af-Gm-Gf-Am-Um-C | |
| G4 | m-Cm-Am-Um-G4 | | m-Um-Ums-Gms-Gm | |
| D5-D | Ams-Ams-Gm-Am-Um-Cm-Cf-Um- | 337/1 | AmsEVP-Ufs-Gm-Gm-Am-Af-Gm-Am-C | 428/13 |
| V25P | Gf-Cf-Af-Um-Gm-Um-Cm-Um-Uf-C | | m-Am-Um-Gm-Cm-Af-Gm-Gf-Am-Um-C | |
| G5 | m-Cm-Am-Um-G5 | | m-Um-Ums-Gms-Gm | |
| D5-D | Ams-Ams-Gm-Am-Um-Cm-Cf-Um- | 337/1 | AmsEVP-Ufs-Gm-Gm-Am-Af-Gm-Am-C | 428/13 |
| V25P | Gf-Cf-Af-Um-Gm-Um-Cm-Um-Uf-C | | m-Am-Um-Gm-Cm-Af-Gm-Gf-Am-Um-C | |
| G7 | m-Cm-Am-Um-G7 | | m-Um-Ums-Gms-Gm | |
| D51- | Ums-Gms-Gm-Am-Gm-Gm-Cf-Um- | 342/2 | Ams-Ufs-Cf-Cf-Am-Gf-Am-Am-Am-Gm- | 381/14 |
| DV26 | Uf-Af-Gf-Cm-Um-Um-Um-Cm-Uf-G | | Cm-Um-Am-Af-Gm-Cf-Cm-Um-Cm-Cm- | |
| G4 | m-Gm-Am-Um-G4 | | Ams-Ums-Um | |
| D51- | Ums-Gms-Gm-Am-Gm-Gm-Cf-Um- | 342/2 | Ams-Ufs-Cf-Cf-Am-Gf-Am-Am-Am-Gm- | 381/14 |
| DV26 | Uf-Af-Gf-Cm-Um-Um-Um-Cm-Uf-G | | Cm-Um-Am-Af-Gm-Cf-Cm-Um-Cm-Cm- | |
| G6 | m-Gm-Am-Um-G6 | | Ams-Ums-Um | |
| D51- | Ums-Gms-Gm-Am-Gm-Gm-Cf-Um- | 342/2 | Ams-Ufs-Cf-Cf-Am-Gf-Agna-Am-Am-G | 430/14 |
| DV26 | Uf-Af-Gf-Cm-Um-Um-Um-Cm-Uf-G | | m-Cm-Um-Am-Af-Gm-Cf-Cm-Um-Cm-C | |
| G5+ | m-Gm-Am-Um-G5 | | m-Ams-Ums-Um | |
| D51- | Ums-Gms-Gm-Am-Gm-Gm-Cf-Um- | 342/2 | Ams-Ufs-Cf-Cf-Am-Gf-Agna-Am-Am-G | 430/14 |
| DV26+ | Uf-Af-Gf-Cm-Um-Um-Um-Cm-Uf-G | | m-Cm-Um-Am-Af-Gm-Cf-Cm-Um-Cm-C | |
| G7 | m-Gm-Am-Um-G7 | | m-Ams-Ums-Um | |
| D51- | Ums-Gms-Gm-Am-Gm-Gm-Cf-Um- | 342/2 | AmsEVP-Ufs-Cf-Cf-Am-Gf-Am-Am-Am- | 431/14 |
| DV26 | Uf-Af-Gf-Cm-Um-Um-Um-Cm-Uf-G | | Gm-Cm-Um-Am-Af-Gm-Cf-Cm-Um-Cm- | |
| PG6 | m-Gm-Am-Um-G6 | | Cm-Ams-Ums-Um | |
| D51- | Ums-Gms-Gm-Am-Gm-Gm-Cf-Um- | 342/2 | AmsEVP-Ufs-Cf-Cf-Am-Gf-Am-Am-Am- | 431/14 |
| DV26 | Uf-Af-Gf-Cm-Um-Um-Um-Cm-Uf-G | | Gm-Cm-Um-Am-Af-Gm-Cf-Cm-Um-Cm- | |
| PG7 | m-Gm-Am-Um-G7 | | Cm-Ams-Ums-Um | |
| D81- | Cms-Ums-Um-Um-Um-Gm-Uf-Am- | 347/3 | Ams-Afs-Um-Am-Um-Cf-Um-Um-Cm-A | 384/15 |
| DV25 | Af-Cf-Uf-Um-Gm-Am-Am-Gm-Af-U | | m-Am-Gm-Um-Uf-Am-Cf-Am-Am-Am- | |
| G4 | m-Am-Um-Um-G4 | | Am-Gms-Cms-Am | |
| D81- | Cms-Ums-Um-Um-Um-Gm-Uf-Am- | 347/3 | Ams-Afs-Um-Am-Um-Cf-Um-Um-Cm-A | 384/15 |
| DV25 | Af-Cf-Uf-Um-Gm-Am-Am-Gm-Af-U | | m-Am-Gm-Um-Uf-Am-Cf-Am-Am-Am- | |
| G7 | m-Am-Um-Um-G7 | | Am-Gms-Cms-Am | |
| D81- | Cms-Ums-Um-Um-Um-Gm-Uf-Am- | 347/3 | AmsEVP-Afs-Um-Af-Uf-Cf-Um-Um-Cm- | 437/15 |
| DV27 | Af-Cf-Uf-Um-Gm-Am-Am-Gm-Af-U | | Am-Am-Gm-Um-Uf-Am-Cf-Am-Am-Am- | |
| PG4 | m-Am-Um-Um-G4 | | Am-Gms-Cms-Am | |
| D81- | Cms-Ums-Um-Um-Um-Gm-Uf-Am- | 347/3 | AmsEVP-Afs-Um-Af-Uf-Cf-Ugna-Um-C | 438/15 |
| DV27+ | Af-Cf-Uf-Um-Gm-Am-Am-Gm-Af-U | | m-Am-Am-Gm-Um-Uf-Am-Cf-Am-Am- | |
| PG5 | m-Am-Um-Um-G5 | | Am-Am-Gms-Cms-Am | |
| D81- | Cms-Ums-Um-Um-Um-Gm-Uf-Am- | 347/3 | AmsEVP-Afs-Um-Af-Uf-Cf-Ugna-Um-C | 438/15 |
| DV27+ | Af-Cf-Uf-Um-Gm-Am-Am-Gm-Af-U | | m-Am-Am-Gm-Um-Uf-Am-Cf-Am-Am- | |
| PG7 | m-Am-Um-Um-G7 | | Am-Am-Gms-Cms-Am | |
| D81- | Cms-Ums-Um-Um-Um-Gm-Uf-Am- | 348/3 | Ams-Afs-Uf-Af-Um-Cf-Um-Um-Cm-Am- | 385/15 |
| DV28 | Af-Cm-Uf-Um-Gm-Am-Am-Gm-Af- | | Am-Gm-Um-Uf-Am-Cf-Am-Am-Am-Am- | |
| G6 | Um-Am-Um-Um-G6 | | Gms-Cms-Am | |
| D82- | Gms-Ams-Am-Gm-Am-Um-Af-Um- | 352/4 | AmsEVP-Afs-Am-Cf-Cf-Cf-Am-Gm-Am- | 448/16 |
| DV27 | Uf-Uf-Af-Um-Um-Cm-Um-Gm-Gf-G | | Am-Um-Am-Am-Af-Um-Af-Um-Cm-Um- | |
| PG5 | m-Um-Um-Um-G5 | | Um-Cms-Ams-Am | |
| D82- | Gms-Ams-Am-Gm-Am-Um-Af-Um- | 352/4 | AmsEVP-Afs-Am-Cf-Cf-Cf-Am-Gm-Am- | 448/16 |
| DV27 | Uf-Uf-Af-Um-Um-Cm-Um-Gm-Gf-G | | Am-Um-Am-Am-Af-Um-Af-Um-Cm-Um- | |
| PG7 | m-Um-Um-Um-G7 | | Um-Cms-Ams-Am | |
| D82- | Gms-Ams-Am-Gm-Am-Um-Af-Um- | 353/4 | Ams-Afs-Am-Cf-Cf-Cf-Am-Gm-Am-Am- | 390/16 |
| DV29 | Uf-Um-Af-Um-Um-Cm-Um-Gm-Gf- | | Um-Am-Am-Af-Um-Af-Um-Cm-Um- | |
| G4 | Gm-Um-Um-Um-G4 | | Um-Cms-Ams-Am | |
| D82- | Gms-Ams-Am-Gm-Am-Um-Af-Um- | 353/4 | Ams-Afs-Am-Cf-Cf-Cf-Am-Gm-Am-Am- | 390/16 |
| DV29 | Uf-Um-Af-Um-Um-Cm-Um-Gm-Gf- | | Um-Am-Am-Af-Um-Af-Um-Cm-Um- | |
| G7 | Gm-Um-Um-Um-G7 | | Um-Cms-Ams-Am | |
| D82- | Gms-Ams-Am-Gm-Am-Um-Af-Um- | 353/4 | AmsEVP-Afs-Am-Cf-Cf-Cf-Am-Gm-Am- | 448/16 |
| DV29 | Uf-Um-Af-Um-Um-Cm-Um-Gm-Gf- | | Am-Um-Am-Am-Af-Um-Af-Um-Cm-Um- | |
| PG5 | Gm-Um-Um-Um-G5 | | Um-Cms-Ams-Am | |
| D82- | Gms-Ams-Am-Gm-Am-Um-Af-Um- | 353/4 | AmsEVP-Afs-Am-Cf-Cf-Cf-Am-Gm-Am- | 448/16 |
| DV29 | Uf-Um-Af-Um-Um-Cm-Um-Gm-Gf- | | Am-Um-Am-Am-Af-Um-Af-Um-Cm-Um- | |
| PG6 | Gm-Um-Um-Um-G6 | | Um-Cms-Ams-Am | |
| D82- | Gms-Ams-Am-Gm-Am-Um-Af-Um- | 353/4 | AmsEVP-Afs-Am-Cf-Cf-Cf-Am-Gm-Am- | 448/16 |
| DV29 | Uf-Um-Af-Um-Um-Cm-Um-Gm-Gf- | | Am-Um-Am-Am-Af-Um-Af-Um-Cm-Um- | |
| PG7 | Gm-Um-Um-Um-G7 | | Um-Cms-Ams-Am | |
| D84- | Gms-Ums-Um-Um-Um-Gm-Uf-Am- | 357/5 | Ums-Ufs-Af-Af-Um-Af-Am-Am-Am-Am- | 393/17 |
| DV26 | Gf-Cf-Af-Um-Um-Um-Um-Um-Af-U | | Um-Gm-Cm-Uf-Am-Cf-Am-Am-Am-Am- | |
| G4 | m-Um-Am-Am-G4 | | Cms-Cms-Cm | |
| D84- | Gms-Ums-Um-Um-Um-Gm-Uf-Am- | 357/5 | Ums-Ufs-Af-Af-Um-Af-Am-Am-Am-Am- | 393/17 |
| DV26 | Gf-Cf-Af-Um-Um-Um-Um-Um-Af-U | | Um-Gm-Cm-Uf-Am-Cf-Am-Am-Am-Am- | |
| G6 | m-Um-Am-Am-G6 | | Cms-Cms-Cm | |
| D84- | Gms-Ums-Um-Um-Um-Gm-Uf-Am- | 357/5 | UmsEVP-Ufs-Am-Af-Uf-Af-Am-Am-Am- | 446/17 |
| DV27 | Gf-Cf-Af-Um-Um-Um-Um-Um-Af-U | | Am-Um-Gm-Cm-Uf-Am-Cf-Am-Am-Am- | |
| PG4 | m-Um-Am-Am-G4 | | Am-Cms-Cms-Cm | |
| D84- | Gms-Ums-Um-Um-Um-Gm-Uf-Am- | 357/5 | UmsEVP-Ufs-Am-Af-Uf-Af-Am-Am-Am- | 446/17 |
| DV27 | Gf-Cf-Af-Um-Um-Um-Um-Um-Af-U | | Am-Um-Gm-Cm-Uf-Am-Cf-Am-Am-Am- | |
| PG6 | m-Um-Am-Am-G6 | | Am-Cms-Cms-Cm | |
| D84- | Gms-Ums-Um-Um-Um-Gm-Uf-Am- | 357/5 | UmsEVP-Ufs-Am-Af-Uf-Af-Agna-Am-A | 447/17 |
| DV27+ | Gf-Cf-Af-Um-Um-Um-Um-Um-Af-U | | m-Am-Um-Gm-Cm-Uf-Am-Cf-Am-Am-A | |
| PG4 | m-Um-Am-Am-G4 | | m-Am-Cms-Cms-Cm | |
| D84- | Gms-Ums-Um-Um-Um-Gm-Uf-Am- | 357/5 | UmsEVP-Ufs-Am-Af-Uf-Af-Agna-Am-A | 447/17 |
| DV27+ | Gf-Cf-Af-Um-Um-Um-Um-Um-Af-U | | m-Am-Um-Gm-Cm-Uf-Am-Cf-Am-Am-A | |
| PG5 | m-Um-Am-Am-G5 | | m-Am-Cms-Cms-Cm | |
| D84- | Gms-Ums-Um-Um-Um-Gm-Uf-Am- | 357/5 | UmsEVP-Ufs-Am-Af-Uf-Af-Agna-Am-A | 447/17 |
| DV27+ | Gf-Cf-Af-Um-Um-Um-Um-Um-Af-U | | m-Am-Um-Gm-Cm-Uf-Am-Cf-Am-Am-A | |
| PG7 | m-Um-Am-Am-G7 | | m-Am-Cms-Cms-Cm | |

### Preparation of Test Drug:

[0559] Drug solvent: PBS buffer
[0560] Preparation conditions: Sterile environment
[0561] Labeling method: The prepared drug formulations were labeled, and the outer packaging was marked with the topic number, name, concentration, amount, preparation date, preparer, and storage conditions;
[0562] Storage conditions: The samples were prepared immediately before use and the remaining samples were stored at −80° C.

### Experimental Animal Information:

[0563] Species/Strain: hPCSK9 transgenic mice
[0564] Rating: SPF
[0565] Gender: Male
[0566] Quantity: 214
[0567] Age: 4-7 weeks
[0568] Weight: 18-20 g
[0569] Source: Jiangsu GemPharmatech Co., Ltd.
[0570] Production license number: SCXK (Su) 2018-0008

### Experimental Animal Ethics Review (IACUC):

[0571] The experimental animals were received and then kept at Tianjin Yugen Medtech Co., Ltd., with the use license number: SYXK (Jinbin) 2019-0002. This project had been reviewed by the Experimental Animal Ethics Committee of Tianjin Yugen Medtech Co., Ltd., and the experimental process was carried out in strict accordance with IACUC requirements to ensure animal welfare.

### Feeding and Management:

[0572] Feeding conditions: The experimental animals were received and kept by Tianjin Yugen Medtech Co., Ltd., with the license number SYXK (Jinbin) 2019-0002. They were kept in a feeding cage with the specifications of length×width×height=29.0 cm×18.5 cm×13.0 cm; the temperature range was set at 20-26° C., the humidity range was set at 40%-70%, the air change frequency was not less than 15 times of fresh air/hour, and the artificial lighting was alternating between 12 hours of light and 12 hours of dark.

[0573] The breeding environment conditions were based on the National Standard of the People's Republic of China GB14925-2010, and the environment was controlled by a modular air-conditioning unit.

[0574] Animals were allowed to eat and drink freely. The drinking water bottles and the drinking water in the bottles should be changed at least twice a week. After use, the drinking water bottles were sterilized under high pressure in a pulsating vacuum sterilizer and then reused.

[0575] Animal cages and bedding should be replaced at least once a week. All animal cages and bedding should be sterilized under high pressure in a pulsating vacuum sterilizer before being used in a barrier environment. Animal cages should be cleaned, disinfected and wiped at least once a week.

[0576] The animal breeding and observation room is cleaned and disinfected every day, including the flat racks, floors, tables, etc.

[0577] The disinfectants used in the barrier environment included: 6.67% bromo-geraminum solution, 0.5% 84 disinfectant, 75% disinfectant, and 0.08% Bestaquam. The four disinfectants should be used in turn and cannot be mixed.

[0578] Experimental animal feed: SPF rat maintenance feed, produced by SPF (Beijing) biotechnology Co. Ltd., with the animal feed production license number of SCXK (Beijing) 2019-0010, issued by Beijing Municipal Science and Technology Commission.

[0579] Feed testing: Each batch of feed had a quality certificate, and our company conducted microbiological testing once a quarter. The feed supplier provided a recent third-party feed testing report every six months. Feed nutrient testing referred to the National Standard of the People's Republic of China GB14924.3-2010, and pollutant index testing referred to the National Standard of the People's Republic of China GB14924.2-2001.

[0580] Drinking water for experimental animals: Drinking water: sterile water prepared by the filtration system, directly filled in drinking bottles.

[0581] Drinking water testing: Our company conducted microbiological testing once a quarter and sent water to a third-party testing agency for water quality testing once a year. Drinking water testing referred to the National Standard of the People's Republic of China GB5749-2006.

[0582] Animal bedding: Corn cob bedding: produced by SPF (Beijing) Biotechnology Co., Ltd., with the animal bedding production license number of SCXK (Beijing) 2019-0004, issued by Beijing Municipal Science and Technology Commission.

[0583] Bedding testing: Our company conducted microbiological testing once a quarter, and the bedding supplier provided at least one third-party bedding testing report every six months. Bedding testing referred to the National Standard of the People's Republic of China GB14924.2-2001.

### 2. Experimental Methods

### Dosage Design and Grouping

[0584] Definition of experimental date: The day on which the animals were administered with the drug solvent or the test drug was defined as day 0.

[0585] Grouping and administration: After the experimental animals were adaptively fed, they were randomly divided into a negative control group and a test drug group according to the serum PSCK9 protein content, with 5 animals in each group. The drug was administered by a single subcutaneous injection, with an amount of 6 mg/kg, a volume of 1 mL/kg, and a concentration of 6 mg/mL. The day of administration was recorded as day 0.

[0586] Animals were individually identified by ear tags. Cages were identified by hanging cage cards. Laboratory identification signs were hung at the door of the laboratory. Grouping information is detailed in the table below:

TABLE 39

| | | Amount | Administration | Cycle | Number of |
|---|---|---|---|---|---|
| Group | Drug | (mg/kg) | route/frequency | (days) | animals |
| Negative | drug | / | / | 35 | 5 |
| control group | solvent | | | | |
| Test drug | siRNA | 6 | s.c./once | 35 | 5 |
| group | | | | | |

### Detection Indicator

### (1) General Observation

[0587] The subjects were observed once a day from one week before administration to the end of the experiment.

[0588] Observation content: The animal's death or dying, mental state, behavioral activities, feces characteristics, feed and water supply, etc. were observed beside the cage.

[0589] Test animals: all animals in the negative control group and the test drug group.

### (2) Expression of PCSK9 Protein in Serum

[0590] Detection time: before administration on day-3 (day-3), 1 week after administration on day 7 (1 w), 2 weeks after administration on day 14 (2 w), 3 weeks after administration on day 21 (3 w), 4 weeks after administration on day 28 (4 w), and 5 weeks after administration on day 35 (5 w).

[0591] PCSK9 protein level detection method: ELISA kit was used for detection; serum samples were prevented from repeated freezing and thawing.

[0592] Test animals: all animals in the negative control group and the test drug group.

### (3) Blood Lipid Detection

[0593] At detection times of 3 days before administration (day-3), day 7 after administration (1 week, 1 w), day 14 after administration (2 weeks, 2 w), day 21 after administration (3 weeks, 3 w), day 28 after administration (4 weeks, 4 w), and day 35 after administration (5 weeks, 5 w), about 200 μL of blood was collected from the inner canthus. The whole blood sample was temporarily stored in an ice box, then centrifuged at 2-8° C. and about 3000 g for 10 min, divided into 2 tubes (one of which was about 60 μL, and the remaining serum was stored in the other tube), and stored at −70 to −86° C. for blood lipid detection.

### (4) Data Processing and Statistical Analysis

[0594] The experimental data were expressed as mean±standard deviation (Mean±SD) and analyzed using GraphPad Prism 8.3 analysis software. The LSD test was used to test for homogeneity of variance, and the Dunnett T3 test was used for unequal variance. P<0.05 was considered statistically significant.

### 3. Experimental Results

[0595] Specific experimental results are shown in Tables 40-42.

[0596] It can be seen that these sequences can continuously and significantly inhibit PCSK9 protein in serum, and significantly reduce low-density lipoprotein cholesterol (LDL-C) and total cholesterol (TC) levels in serum. For example, in the D81-DV25G7 group, the inhibition rates of PCSK9 protein in serum reached 83.1%, 82.2% and 70.3% on days 7, 14, and 28, respectively; in the D82-DV27PG5 group, the serum LDL-C levels were reduced by 32.6%, 35.8% and 21.7% on days 7, 14, and 28, respectively; in the D82-DV29PG7 group, the serum TC levels were reduced by 32.2%, 26.8% and 19.6% on days 7, 14, and 28, respectively.

(1) The Sequences of the Present Disclosure, Such as the Basic Sequences 5, 51, 81, 82 and 84 with Different Modifications Exhibited a Significant Inhibitory Effect on the Expression of PCSK9 Protein in Serum. For Example, the Inhibition Rates by D81-DV25G7 Reached 83.1%, 82.2%, and 70.3% on Days 7, 14, and 28, Respectively.

TABLE 40
Inhibition rates of PCSK9 protein in serum by different sequences

| Basic | | Inhibition rate (%) | | |
|---|---|---|---|---|
| sequence NO. | Sequence No. | Day 7 | Day 14 | Day 28 |
| 5 | D5-DV25PG4 | 78.1 | 70.5 | 53.8 |
| | D5-DV25PG5 | 77.0 | 64.7 | 58.4 |
| 51 | D51-DV26PG6 | 78.2 | 82.6 | 68.2 |
| | D51-DV26 + G5 | 74.7 | 68.0 | 59.3 |
| | D51-DV26 + G7 | 70.6 | 75.3 | 58.1 |
| 81 | D81-DV25G4 | 80.2 | 81.6 | 63.8 |
| | D81-DV25G7 | 83.1 | 82.2 | 70.3 |
| 82 | D82-DV27PG5 | 88.2 | 87.4 | 69.2 |
| | D82-DV27PG7 | 81.9 | 86.3 | 72.6 |
| | D82-DV29G4 | 74.2 | 81.6 | 72.6 |
| | D82-DV29PG5 | 83.8 | 90.0 | 76.4 |
| 84 | D84-DV26G4 | 81.7 | 77.4 | 65.8 |
| | D84-DV26G6 | 75.6 | 79.5 | 56.3 |
| | D84-DV27 + PG5 | 84.0 | 76.1 | 63.4 |
| | D84-DV27 + PG7 | 78.9 | 77.6 | 60.8 |

[0597] As can be seen from Table 40, the conjugates formed by conjugating each sequence with a GalNAc compound exhibited a significant inhibitory effect on PCSK9 protein expression in serum. For example, the inhibition rates by D81-DV25G7 reached 83.1%, 82.2%, and 70.3% on days 7, 14, and 28, respectively (FIG. 9).

[0598] It shows that the basic sequences designed in the present disclosure, such as 5, 51, 81, 82 and 84, after modification with the modification templates of the present disclosure, or with further 5′-E-VP modification or/and an anti-off-target design and conjugation with the GalNAc compound, can be efficiently delivered to animal liver and significantly inhibit PCSK9 gene expression.

(2) The Sequences of the Present Disclosure, Such as the Basic Sequences 5, 51, 81, 82 and 84 with Different Modifications can Significantly Reduce Low-Density Lipoprotein Cholesterol (LDL-C) Levels in Serum. For Example, in the D82-DV27PG5 Group, the LDL-C Levels Decreased by 32.6%, 35.8%, and 21.7% on Days 7, 14, and 28, Respectively.

TABLE 41
Reduction of low-density lipoprotein cholesterol
(LDL-C) levels in serum by different sequences

| | | Reduction (%) | | |
|---|---|---|---|---|
| Basic sequence NO. | Sequence No. | Day 7 | Day 14 | Day 28 |
| 5 | D5-DV25PG5 | 21.2 | 16.9 | 15.4 |
| | D5-DV25PG7 | 20.7 | 18.7 | 19.2 |
| 51 | D51-DV26G4 | 19.7 | 21.9 | 17.7 |
| | D51-DV26G6 | 24.5 | 18.4 | 16.8 |
| 81 | D81-DV27PG4 | 25.2 | 25.3 | 17.3 |
| | D81-DV27 + PG5 | 25.2 | 18.3 | 18.2 |
| | D81-DV27 + PG7 | 21.9 | 17.9 | 16.8 |
| 82 | D82-DV27PG5 | 32.6 | 35.8 | 21.7 |
| | D82-DV29G4 | 29.3 | 34.1 | 22.5 |
| | D82-DV29G7 | 30.6 | 32.9 | 23.7 |
| | D82-DV29PG5 | 30.1 | 31.2 | 22.8 |
| 84 | D84-DV27PG4 | 30.1 | 26.1 | 20.7 |
| | D84-DV27PG6 | 28.9 | 29.6 | 18.5 |

[0599] As can be seen from Table 41, serum LDL-C was significantly reduced in each experimental group. For example, in the D82-DV27PG5 group, the LDL-C levels decreased by 32.6%, 35.8%, and 21.7% on days 7, 14, and 28, respectively (FIG. 10).

[0600] It shows that the basic sequences designed in the present disclosure, such as 5, 51, 81, 82 and 84, after modification with the modification templates of the present disclosure, or with further 5′-E-VP modification or/and an anti-off-target design and conjugation with the GalNAc compound, can be efficiently delivered to animal liver and significantly reduce low-density lipoprotein cholesterol (LDL-C) levels in serum.

(3) The Sequences of the Present Disclosure, Such as the Basic Sequences 5, 51, 81, 82 and 84 with Different Modifications, can Significantly Reduce Total Cholesterol (TC) Levels in Serum. For Example, in the D82-DV29PG7 Group, the TC Levels Decreased by 32.2%, 26.8%, and 19.6% on Days 7, 14, and 28, Respectively.

TABLE 42
Reduction of total cholesterol (TC) levels
in serum by different sequences

| | | Reduction (%) | | |
|---|---|---|---|---|
| Basic sequence NO. | Sequence No. | Day 7 | Day 14 | Day 28 |
| 5 | D5-DV27 + G4 | 21.5 | 20.8 | 13.2 |
| | D5-DV27 + G7 | 19.7 | 18.7 | 9.2 |
| 51 | D51-DV26PG6 | 24.1 | 18.3 | 11.9 |
| | D51-DV26PG7 | 19.7 | 20.3 | 10.7 |
| 81 | D81-DV25G7 | 21.7 | 22.2 | 13.1 |
| | D81-DV27 + PG5 | 21.1 | 16.1 | 15.6 |
| | D81-DV27 + PG7 | 17.9 | 21.6 | 13.8 |
| | D81-DV28G6 | 22.9 | 19.1 | 13.4 |
| 82 | D82-DV29PG5 | 31.4 | 27.0 | 18.5 |
| | D82-DV29PG6 | 28.9 | 29.6 | 17.1 |
| | D82-DV29PG7 | 32.2 | 26.8 | 19.6 |
| 84 | D84-DV26G6 | 28.9 | 29.6 | 18.5 |
| | D84-DV27 + PG4 | 28.4 | 25.7 | 14.9 |
| | D84-DV27 + PG5 | 22.8 | 22.9 | 16.5 |

[0601] As can be seen from Table 42, total cholesterol (TC) in serum was significantly reduced in each experimental group. For example, in the D82-DV29PG7 group, the TC levels decreased by 32.2%, 26.8%, and 19.6% on days 7, 14, and 28, respectively (FIG. 11).

[0602] It shows that the basic sequences designed in the present disclosure, such as 5, 51, 81, 82 and 84, after modification with the modification templates of the present disclosure, or with further 5′-E-VP modification or/and an anti-off-target design and conjugation with the GalNAc compound, can be efficiently delivered to animal liver and significantly reduce total cholesterol (TC) levels in serum.

### SUMMARY

[0603] The basic sequences designed in the present disclosure, such as 5, 51, 81, 82 and 84, after modification with the modification templates of the present disclosure, or with further 5′-E-VP modification or/and an anti-off-target design and conjugation with the GalNAc compound, can be efficiently delivered to animal liver, and can continuously and significantly inhibit the expression of PCSK9 protein in serum and reduce low-density lipoprotein cholesterol (LDL-C) levels in serum and total cholesterol (TC) levels in serum.

[0604] For example, the inhibition rate of PCSK9 protein expression in the serum by the D81-DV25G7 group reached 83.1%, 82.2%, and 70.3% on days 7, 14, and 28, respectively; in the D82-DV27PG5 group, the low-density lipoprotein cholesterol (LDL-C) levels in serum decreased by 32.6%, 35.8%, and 21.7% on days 7, 14, and 28, respectively; in the D82-DV29PG7 group, the total cholesterol (TC) levels in serum decreased by 32.2%, 26.8%, and 19.6% on days 7, 14, and 28, respectively

### Conclusion

[0605] The present disclosure designed a series of siRNAs based on the PCSK9 mRNA sequence, which were alternately modified and modified using a specific set of modification templates, and some of the sequences were modified with an anti-off-target and 5′-E-VP modifications. The results demonstrate:

[0606] (1) Unmodified sequences, including basic sequences 5, 51, 81, 82, 84, 3, 8, 9, 21, 31, 73 and 83, all exhibited a significant inhibitory effect on PCSK9, with the highest inhibition rate exceeding 60%.

[0607] (2) The inhibition rate of sequences with multiple modifications reached up to 90% or more. Moreover, the modified sequence conjugated with a GalNAc compound can be efficiently delivered to the animal liver, markedly inhibiting PCSK9 gene expression, substantially reducing low-density lipoprotein cholesterol (LDL-C) levels in serum, and significantly reducing total cholesterol (TC) levels in serum.

[0608] The details are as follows:

### 1. The Alternately Modified Sequence of the Present Disclosure had a Significant Inhibitory Effect on the PCSK9 Gene

[0609] (1) Among the 84 designed sequences, 12 sequences exhibited significant inhibitory effects on the PCSK9 gene, with inhibition rates exceeding 50%, including P92-si5, P92-si51, P92-si81, P92-si82, P92-si84, P92-si3, P92-si8, P92-si9, P92-si21, P92-si31, P92-si73 and P92-si83, among which the inhibition rate of P92-si5, P92-si81, P92-si82, P92-si3, P92-si8 and P92-si31 exceeded 70%.

[0610] (2) The inhibition rate of 26 sequences on the PCSK9 gene was 30%-50%. For example, the inhibition rates of P92-si6 and P92-si7 were 38.3% and 35.7%, respectively.

[0611] (3) The inhibition rate of 46 sequences on the PCSK9 gene was less than 30%. For example, the inhibition rates of P92-si1 and P92-si20 were only 9.2% and 6.0%, respectively.

[0612] (4) siRNAs with similar sequences had very different activities. For example, the inhibition rate of P92-si5 was 61.8% higher than that of P92-si4, indicating a significant improvement.

### 2. The Unmodified Sequence of the Present Disclosure had a Significant Inhibitory Effect on the PCSK9 Gene

[0613] (1) 12 unmodified sequences exhibited a significant inhibitory effect on the PCSK9 gene, with inhibition rates exceeding 50%, including si5, si51, si81, si82, si84, si3, si8, si9, si21, si31, si73 and si83, among which the inhibition rate of si5, si81, si82, si3 and si8 exceeded 60%.

[0614] (2) The inhibition rates of other unmodified sequences on the PCSK9 gene were less than 40%. For example, the inhibition rates of si52 and si74 were only 0.5% and 2.2%, respectively.

[0615] (3) siRNAs with similar sequences had very different activities. For example, the inhibition rate of basic sequence 5 was 51.2% higher than that of basic sequence 4, indicating a significant improvement.

[0616] (4) Different sequences exhibited disparate effects on activity after alternate modifications. Some inhibition rates demonstrated a notable enhancement, exemplified by basic sequence 5, whose alternately modified sequence exhibited an elevated inhibition rate of 12.4% relative to its unmodified sequence. Conversely, some inhibition rates exhibited a less pronounced alteration, as observed in basic sequences 4, 22, and 52, where the inhibition rates of alternately modified and unmodified sequences exhibited minimal deviation.

3. The Sequence Modified with the Modification Templates of the Present Disclosure had a Significant Inhibitory Effect on the PCSK9 Gene.

[0617] (1) The basic sequences 5, 51, 81, 82, 84, 3, 8, 9, 21, 31, 73 and 83, after being modified with the modification templates DV25-29 designed in the present disclosure, exhibited a significant inhibitory effect on PCSK9 gene expression, with an inhibition rate above 70%, among which the inhibition rates of P92-si81-DV26, P92-si82-DV27 and P92-si82-DV29 reached 89.3%, 89.3% and 89.1%, respectively.

[0618] (2) The above 12 sequences modified with the modification templates DV25-29 of the present disclosure significantly improved the inhibition rate against the PCSK9 gene expression compared with the alternately modified sequences. For example, P92-si51-DV27 obtained by modifying basic sequence 51 with templates DV27 increased the inhibition rate by 29.1% compared to the alternately modified sequence, and P92-si81-DV26 obtained by modifying basic sequence 81 with templates DV26 increased the inhibition rate by 26.9% compared to the alternately modified sequence.

[0619] (3) The sequences modified on the same sequence with the modification templates DV25-29 of the present disclosure significantly improved the inhibition rate against the PCSK9 gene expression compared with using the modification templates disclosed in the prior art. For example, basic sequence 51 modified with the modification template DV27 of the present disclosure increased the inhibition rate by 21.3% compared with the disclosed Advanced ESC template DV21.

[0620] (4) The sequences modified on the same sequence with the modification templates DV25-29 of the present disclosure significantly improved the inhibition rate against the PCSK9 gene expression compared with using other modification templates DV30 and DV31 of the present disclosure. For example, basic sequence 51 modified with the modification template DV27 of the present disclosure increased the inhibition rate by 22.8% compared with the modification template DV31 of the present disclosure.

[0621] (5) The EC50 values of the above 12 sequences were between 0.0001 nM and 0.005 nM, among which the EC50 values of P92-si81-DV27, P92-si84-DV26 and P92-si82-DV27 were 0.0003 nM, 0.0004 nM and 0.0006 nM, respectively. These results demonstrate that the sequences can effectively inhibit PCSK9 gene expression at low concentrations.

4. Each Sequence Modified by Alternate Modifications and Modification Templates of the Present Disclosure has Significantly Improved Inhibitory Activity Against PCSK9 Compared with the Unmodified Sequences Disclosed in the Prior Art with Identical Sequences or Minimal Differences.

[0622] (1) Compared with the identical unmodified sequences disclosed in the prior art, the alternately modified sequences and the sequences modified with the specific modification templates of the present disclosure significantly improved the inhibition rate against PCSK9 gene, which can be increased by up to 40%.

[0623] (2) Compared with the unmodified sequences disclosed in the prior art with minimal differences, the unmodified sequences, alternately modified sequences and sequences modified with specific modification templates of the present disclosure significantly improved the inhibition rate against PCSK9 gene, which can be increased by up to 40%.

[0624] I. The unmodified sequences of the present disclosure significantly improved the activity compared with the similar unmodified sequences disclosed in the prior art. For example, the unmodified sequence si31 of the present disclosure improved the inhibition rate by 10.4% compared with 31P with a similar structure.

[0625] II. The alternately modified sequences of the present disclosure significantly improved the activity compared with the similar unmodified sequences disclosed in the prior art. For example, the alternately modified sequence P92-si5 of the present disclosure improved the inhibition rate by 22.0% compared with sequence 5P.

[0626] III. The sequences modified with the modification templates of the present disclosure significantly improved the activity compared with the similar unmodified sequences disclosed in the prior art. For example, the alternately modified sequence P92-si82-DV29 of the present disclosure improved the inhibition rate by 42.8% compared with sequence 82P.

5. The Alternately Modified Sequences and Template-Modified Sequences of the Present Disclosure with a Specific Anti-Off-Target Design Exhibited a Significant Inhibitory Effect on the PCSK9 Gene and Significantly Reduced the Inhibitory Effect on Off-Target Genes.

[0627] (1) Different modified sequences exhibited a significant inhibitory effect on the PCSK9 gene. For example, the inhibition rate of alternately modified P92-si3 reached 75.6%, and the inhibition rate of sequence D84-DV27P with template modification and 5′-E-VP modification was as high as 94.4%.

[0628] I. The alternately modified sequence exhibited a significant inhibitory effect on the PCSK9 gene, with the inhibition rate exceeding 60%, among which P92-si3 reached 75.6%.

[0629] II. The template-modified sequences with anti-off-target design or/and 5′-E-VP modification exhibited a significant inhibitory effect on the PCSK9 gene. For example, the inhibition rate of sequence D84-DV27P with template modification and 5′-E-VP modification was as high as 94.4%.

[0630] (2) Modification with any one or more of the various modification methods of the present disclosure and further anti-off-target design achieved a significant anti-off-target effect on off-target genes and reduced the inhibitory effect on off-target genes.

[0631] I. The alternately modified sequences of the present disclosure with an anti-off-target design exhibited a significant anti-off-target effect and can reduce the inhibition rate of off-target genes by 20%.

[0632] II. The sequences modified with the modification templates of the present disclosure with an anti-off-target design exhibited a significant anti-off-target effect and can reduce the inhibition rate of off-target genes by up to 73.6%.

6. Sequences Modified with the Modification Templates of the Present Disclosure Significantly Inhibited PCSK9 Expression in Mouse Serum and Significantly Reduced Low-Density Lipoprotein Cholesterol (LDL-C) and Total Cholesterol (TC) Levels.

[0633] (1) The basic sequences 5, 51, 81, 82 and 84 of the present disclosure with different modifications exhibited a significant inhibitory effect on the expression of PCSK9 protein in serum. For example, the inhibition rates by D81-DV25G7 reached 83.1%, 82.2%, and 70.3% on days 7, 14, and 28, respectively.

[0634] (2) The basic sequences 5, 51, 81, 82 and 84 of the present disclosure with different modifications can significantly reduce low-density lipoprotein cholesterol (LDL-C) levels in serum. For example, in the D82-DV27PG5 group, the LDL-C levels decreased by 32.6%, 35.8%, and 21.7% on days 7, 14, and 28, respectively.

[0635] (3) The basic sequences 5, 51, 81, 82 and 84 of the present disclosure with different modifications, can significantly reduce total cholesterol (TC) levels in serum. For example, in the D82-DV29PG7 group, the TC levels decreased by 32.2%, 26.8%, and 19.6% on days 7, 14, and 28, respectively.

1. A double-stranded RNAi agent for reducing PCSK9 expression, comprising an oligonucleotide duplex consisting of the following paired sense strand and antisense strand:
wherein the sense strand has a sequence set forth in SEQ ID NO: 4 or a modified sequence thereof, wherein the sequence set forth in SEQ ID NO: 4 is shown as
GAAGAUAUUUAUUCUGGGUUU;
and the antisense strand has a sequence set forth in SEQ ID NO: 16 or a modified sequence thereof, wherein the sequence set forth in SEQ ID NO: 16 is shown as
AAACCCAGAAUAAAUAUCUUCAA.

2-19. (canceled)

20. The double-stranded RNAi agent according to claim 1, wherein for the chemical modification on the 2′ position of the ribose of the nucleotide, the nucleotides in the sense strand are modified with 2′-fluoro in odd-numbered positions and with 2′-methoxy in even-numbered positions, and the nucleotides in the antisense strand are modified with 2′-methoxy in odd-numbered positions and with 2′-fluoro in even-numbered positions.

21. (canceled)

22. The double-stranded RNAi agent according to claim 1, wherein nucleotide monomers are connected by a 3′,5′-phosphodiester bond with thio-modification.

23-24. (canceled)

25. The double-stranded RNAi agent according to claim 20, wherein the 5′ carbon atom of the glycoside of the 5′-end nucleotide in the modified antisense strand is phosphorylated by 5′-(E)-vinyl phosphonate (5′-E-VP) with structures of:
wherein, R is C₁₋₄ alkoxy; and
the base is.

26. (canceled)

27. A conjugate for reducing PCSK9 expression, comprising the double-stranded RNAi agent according to claim 1, and a ligand conjugated thereto.

28. The conjugate according to claim 27, wherein the ligand is conjugated to the 3′-end or the 5′-end of the sense strand of the oligonucleotide.

29. The conjugate according to claim 27, wherein the ligand is one or more GalNAc derivatives attached via a divalent or trivalent branched linker.

30. (canceled)

31. The conjugate according to claim 29, wherein the ligand is:

[chemical structure]

32. (canceled)

33. The conjugate according to claim 29, wherein the ligand is G4, G5, G6 or G7:

[chemical structure]

[chemical structure]

34. The conjugate according to claim 27, which has a structure selected from the group consisting of:

[chemical structure]

35. (canceled)

36. The conjugate according to claim 27, wherein the oligonucleotide duplex is conjugated with ligand G4, G5, G6 or G7, and the double-stranded RNAi agent comprises an oligonucleotide duplex consisting of paired sense strand and antisense strand, wherein
(1) the sense strand has a sequence set forth in SEQ ID NO: 352; and the antisense strand has a sequence set forth in SEQ ID NO: 448;
wherein the sense strand set forth in SEQ ID NO: 352 is shown as:
Gms-Ams-Am-Gm-Am-Um-Af-Um-Uf-Uf-Af-Um-Um-Cm-Um-Gm-Gf-Gm-Um-Um-Um;
and
the antisense strand set forth in SEQ ID NO: 448 is shown as:
AmsEVP-Afs-Am-Cf-Cf-Cf-Am-Gm-Am-Am-Um-Am-Am-Af-Um-Af-Um-Cm-Um-Um-
Cms-Ams-Am;
(2) the sense strand has a sequence set forth in SEQ ID NO: 353; and the antisense strand has a sequence set forth in SEQ ID NO: 390;
wherein the sense strand set forth in SEQ ID
NO: 353 is shown as:
Gms-Ams-Am-Gm-Am-Um-Af-Um-Uf-Um-Af-Um-Um-Cm-Um-Gm-
Gf-Gm-Um-Um-Um;
and
the antisense strand set forth in SEQ ID NO: 390
is shown as:
Ams-Afs-Am-Cf-Cf-Cf-Am-Gm-Am-Am-Um-Am-Am-Af-Um-Af-
Um-Cm-Um-Um-Cms-Ams-Am;
or
(3) the sense strand has a sequence set forth in SEQ ID NO: 353; and the antisense strand has a sequence set forth in SEQ ID NO: 448;
wherein the sense strand set forth in SEQ ID
NO: 353 is shown as:
Gms-Ams-Am-Gm-Am-Um-Af-Um-Uf-Um-Af-Um-Um-Cm-Um-Gm-
Gf-Gm-Um-Um-Um;
and
the antisense strand set forth in SEQ ID NO: 448
is shown as:
AmsEVP-Afs-Am-Cf-Cf-Cf-Am-Gm-Am-Am-Um-Am-Am-Af-Um-
Af-Um-Cm-Um-Um-Cms-Ams-Am;
wherein Af, Gf, Cf and Uf are 2′-fluoro modified A, G, C and U nucleotides respectively; Am, Gm, Cm and Um are 2′-methoxy modified A, G, C and U nucleotides respectively; s indicates that 3′,5′-phosphodiester bond connecting nucleotide monomers is thio-modified; the 5′-position carbon atom of the 5′-terminal nucleotide glycoside of the antisense strand shown in SEQ ID NO. 448 is phosphorylated by 5′-vinyl phosphonate group EVP.

37. (canceled)

38. A pharmaceutical composition, comprising the double-stranded RNAi agent according to claim 1, and a pharmaceutically acceptable carrier.

39. Use of the double-stranded RNAi agent according to claim 1 in the manufacture of a medicament for treating a PCSK9-related disease;
wherein the PCSK9-related disease is selected from the group consisting of hypercholesterolemia, atherosclerosis, dyslipidemia, and cardiovascular and cerebrovascular diseases.

40. (canceled)

41. The double-stranded RNAi agent according to claim 22, wherein the double-stranded RNAi agent comprises an oligonucleotide duplex consisting of paired sense strand and antisense strand, wherein the sense strand has a sequence set forth in SEQ ID NO: 172; and the antisense strand has a sequence set forth in SEQ ID NO: 184, wherein
the sense strand set forth in SEQ ID NO: 172
is shown as:
Gfs-Ams-Af-Gm-Af-Um-Af-Um-Uf-Um-Af-Um-Uf-Cm-Uf-Gm-
Gf-Gm-Uf-Um-Uf;
and
the antisense strand set forth in SEQ ID NO: 184
is shown as:
Ams-Afs-Am-Cf-Cm-Cf-Am-Gf-Am-Af-Um-Af-Am-Af-Um-Af-
Um-Cf-Um-Uf-Cms-Afs-Am;
wherein Af, Gf, Cf and Uf are 2′-fluoro modified A, G, C and U nucleotides respectively; Am, Gm, Cm and Um are 2′-methoxy modified A, G, C and U nucleotides respectively; s indicates that 3′,5′-phosphodiester bond connecting nucleotide monomers is thio-modified.

42. The double-stranded RNAi agent according to claim 1, wherein the double-stranded RNAi agent comprises an oligonucleotide duplex consisting of paired sense strand and antisense strand which are selected from the group consisting of:
(1) the sense strand consists of a sequence set forth in SEQ ID NO: 352, and the antisense strand consists of a sequence set forth in SEQ ID NO: 388,
wherein the sense strand set forth in SEQ ID
NO: 352 is shown as:
Gms-Ams-Am-Gm-Am-Um-Af-Um-Uf-Uf-Af-Um-Um-Cm-Um-Gm-
Gf-Gm-Um-Um-Um;
and
the antisense strand set forth in SEQ ID NO: 388
is shown as:
Ams-Afs-Am-Cm-Cm-Cf-Am-Gm-Am-Am-Um-Am-Am-Af-Um-Af-
Um-Cm-Um-Um-Cms-Ams-Am;
(2) the sense strand consists of a sequence set forth in SEQ ID NO: 352, and the antisense strand consists of a sequence set forth in SEQ ID NO: 389,
wherein the sense strand set forth in SEQ ID
NO: 352 is shown as:
Gms-Ams-Am-Gm-Am-Um-Af-Um-Uf-Uf-Af-Um-Um-Cm-Um-Gm-
Gf-Gm-Um-Um-Um;
and
the antisense strand set forth in SEQ ID NO: 389
is shown as:
Ams-Afs-Af-Cf-Cm-Cf-Am-Gm-Am-Am-Um-Am-Am-Af-Um-Af-
Um-Cm-Um-Um-Cms-Ams-Am;
(3) the sense strand consists of a sequence set forth in SEQ ID NO: 352, and the antisense strand consists of a sequence set forth in SEQ ID NO: 390,
wherein the sense strand set forth in SEQ ID
NO: 352 is shown as:
Gms-Ams-Am-Gm-Am-Um-Af-Um-Uf-Uf-Af-Um-Um-Cm-Um-Gm-
Gf-Gm-Um-Um-Um;
and
the antisense strand set forth in SEQ ID NO: 390
is shown as:
Ams-Afs-Am-Cf-Cf-Cf-Am-Gm-Am-Am-Um-Am-Am-Af-Um-Af-
Um-Cm-Um-Um-Cms-Ams-Am;
(4) the sense strand consists of a sequence set forth in SEQ ID NO: 353, and the antisense strand consists of a sequence set forth in SEQ ID NO: 389,
wherein the sense strand set forth in SEQ ID
NO: 353 is shown as:
Gms-Ams-Am-Gm-Am-Um-Af-Um-Uf-Um-Af-Um-Um-Cm-Um-Gm-
Gf-Gm-Um-Um-Um;
and
the antisense strand set forth in SEQ ID NO: 389
is shown as:
Ams-Afs-Af-Cf-Cm-Cf-Am-Gm-Am-Am-Um-Am-Am-Af-Um-Af-
Um-Cm-Um-Um-Cms-Ams-Am;
(5) the sense strand consists of a sequence set forth in SEQ ID NO: 353, and the antisense strand consists of a sequence set forth in SEQ ID NO: 390,
wherein the sense strand set forth in SEQ ID
NO: 353 is shown as:
Gms-Ams-Am-Gm-Am-Um-Af-Um-Uf-Um-Af-Um-Um-Cm-Um-Gm-
Gf-Gm-Um-Um-Um;
and
the antisense strand set forth in SEQ ID NO: 390
is shown as:
Ams-Afs-Am-Cf-Cf-Cf-Am-Gm-Am-Am-Um-Am-Am-Af-Um-Af-
Um-Cm-Um-Um-Cms-Ams-Am;
(6) the sense strand consists of a sequence set forth in SEQ ID NO: 354, and the antisense strand consists of a sequence set forth in SEQ ID NO: 391,
wherein the sense strand set forth in SEQ ID
NO: 354 is shown as:
Gms-Ams-Am-Gm-Am-Um-Af-Um-Uf-Uf-Af-Um-Um-Cm-Um-Gm-
Gm-Gm-Um-Um-Um;
and
the antisense strand set forth in SEQ ID NO: 391
is shown as:
Ams-Afs-Am-Cm-Cm-Cf-Am-Gm-Am-Am-Um-Am-Am-Af-Um-Am-
Um-Cm-Um-Um-Cms-Ams-Am;
(7) the sense strand consists of a sequence set forth in SEQ ID NO: 355, and the antisense strand consists of a sequence set forth in SEQ ID NO: 388,
wherein the sense strand set forth in SEQ ID
NO: 355 is shown as:
Gms-Ams-Am-Gm-Am-Um-Af-Um-Uf-Uf-Am-Um-Um-Cm-Um-Gm-
Gm-Gm-Um-Um-Um;
and
the antisense strand set forth in SEQ ID NO: 388
is shown as:
Ams-Afs-Am-Cm-Cm-Cf-Am-Gm-Am-Am-Um-Am-Am-Af-Um-Af-
Um-Cm-Um-Um-Cms-Ams-Am;
(8) the sense strand consists of a sequence set forth in SEQ ID NO: 356, and the antisense strand consists of a sequence set forth in SEQ ID NO: 388,
wherein the sense strand set forth in SEQ ID
NO: 356 is shown as:
Gms-Ams-Am-Gm-Am-Um-Af-Um-Uf-Uf-Af-Um-Um-Cm-Um-Gf-
Gf-Gm-Um-Um-Um;
and
the antisense strand set forth in SEQ ID NO: 388
is shown as:
Ams-Afs-Am-Cm-Cm-Cf-Am-Gm-Am-Am-Um-Am-Am-Af-Um-Af-
Um-Cm-Um-Um-Cms-Ams-Am;
(9) the sense strand consists of a sequence set forth in SEQ ID NO: 354, and the antisense strand consists of a sequence set forth in SEQ ID NO: 388,
wherein the sense strand set forth in SEQ ID
NO: 354 is shown as:
Gms-Ams-Am-Gm-Am-Um-Af-Um-Uf-Uf-Af-Um-Um-Cm-Um-Gm-
Gm-Gm-Um-Um-Um;
and
the antisense strand set forth in SEQ ID NO: 388
is shown as:
Ams-Afs-Am-Cm-Cm-Cf-Am-Gm-Am-Am-Um-Am-Am-Af-Um-Af-
Um-Cm-Um-Um-Cms-Ams-Am;
wherein Af, Gf, Cf and Uf are 2′-fluoro modified A, G, C and U nucleotides respectively; Am, Gm, Cm and Um are 2′-methoxy modified A, G, C and U nucleotides respectively; s indicates that 3′,5′-phosphodiester bond connecting nucleotide monomers is thio-modified.

43. The conjugate according to claim 36, wherein the double-stranded RNAi agent comprises an oligonucleotide duplex consisting of paired sense strand and antisense strand, wherein,
(1) the sense strand consists of a sequence set forth in SEQ ID NO: 352, the antisense strand consists of a sequence set forth in SEQ ID NO: 448, and the sense strand of the oligonucleotide duplex is conjugated with ligand G5 or G7,
wherein the sense strand set forth in SEQ ID
NO: 352 is shown as:
Gms-Ams-Am-Gm-Am-Um-Af-Um-Uf-Uf-Af-Um-Um-Cm-Um-Gm-
Gf-Gm-Um-Um-Um;
and
the antisense strand set forth in SEQ ID NO: 448
is shown as:
AmsEVP-Afs-Am-Cf-Cf-Cf-Am-Gm-Am-Am-Um-Am-Am-Af-Um-
Af-Um-Cm-Um-Um-Cms-Ams-Am;
(2) the sense strand consists of a sequence set forth in SEQ ID NO: 353, the antisense strand consists of a sequence set forth in SEQ ID NO: 390, and the sense strand of the oligonucleotide duplex is conjugated with ligand G4 or G7,
wherein the sense strand set forth in SEQ ID
NO: 353 is shown as:
Gms-Ams-Am-Gm-Am-Um-Af-Um-Uf-Um-Af-Um-Um-Cm-Um-Gm-
Gf-Gm-Um-Um-Um;
and
the antisense strand set forth in SEQ ID NO: 390
is shown as:
Ams-Afs-Am-Cf-Cf-Cf-Am-Gm-Am-Am-Um-Am-Am-Af-Um-Af-
Um-Cm-Um-Um-Cms-Ams-Am;
(3) the sense strand consists of a sequence set forth in SEQ ID NO: 353, the antisense strand consists of a sequence set forth in SEQ ID NO: 448, and the sense strand of the oligonucleotide duplex is conjugated with ligand G5, G6 or G7,
wherein the sense strand set forth in SEQ ID
NO: 353 is shown as:
Gms-Ams-Am-Gm-Am-Um-Af-Um-Uf-Um-Af-Um-Um-Cm-Um-Gm-
Gf-Gm-Um-Um-Um;
and
the antisense strand set forth in SEQ ID NO: 448
is shown as:
AmsEVP-Afs-Am-Cf-Cf-Cf-Am-Gm-Am-Am-Um-Am-Am-Af-Um-
Af-Um-Cm-Um-Um-Cms-Ams-Am.

44. The conjugate according to claim 43, wherein the double-stranded RNAi agent comprises an oligonucleotide duplex consisting of paired sense strand and antisense strand, wherein the sense strand has a sequence set forth in SEQ ID NO: 353, the antisense strand has a sequence set forth in SEQ ID NO: 448, and the oligonucleotide duplex is conjugated with ligand G5.

45. A pharmaceutical composition, comprising the conjugate according to claim 27, and a pharmaceutically acceptable carrier.

46. Use of the double-stranded RNAi agent according to the conjugate according to claim 27 in the manufacture of a medicament for treating a PCSK9-related disease;
wherein the PCSK9-related disease is selected from the group consisting of hypercholesterolemia, atherosclerosis, dyslipidemia, and cardiovascular and cerebrovascular diseases.

The application's sequence listing, which the Patent Office published only in electronic form, follows.

SEQUENCE LISTING (469 sequences)

SEQ ID NO: 1 - RNA, 21 nt, synthetic construct
  source 1..21: mol_type = other RNA
aagatcctgcatgtcttccat

SEQ ID NO: 2 - RNA, 21 nt, synthetic construct
  source 1..21: mol_type = other RNA
tggaggcttagctttctggat

SEQ ID NO: 3 - RNA, 21 nt, synthetic construct
  source 1..21: mol_type = other RNA
cttttgtaacttgaagatatt

SEQ ID NO: 4 - RNA, 21 nt, synthetic construct
  source 1..21: mol_type = other RNA
gaagatatttattctgggttt

SEQ ID NO: 5 - RNA, 21 nt, synthetic construct
  source 1..21: mol_type = other RNA
gttttgtagcatttttattaa

SEQ ID NO: 6 - RNA, 21 nt, synthetic construct
  source 1..21: mol_type = other RNA
caccaagatcctgcatgtctt

SEQ ID NO: 7 - RNA, 21 nt, synthetic construct
  source 1..21: mol_type = other RNA
ctcataggcctggagtttatt

SEQ ID NO: 8 - RNA, 21 nt, synthetic construct
  source 1..21: mol_type = other RNA
ggcctggagtttattcggaaa

SEQ ID NO: 9 - RNA, 21 nt, synthetic construct
  source 1..21: mol_type = other RNA
cagcacctgctttgtgtcaca

SEQ ID NO: 10 - RNA, 21 nt, synthetic construct
  source 1..21: mol_type = other RNA
ggtctggaatgcaaagtcaag

SEQ ID NO: 11 - RNA, 21 nt, synthetic construct
  source 1..21: mol_type = other RNA
gcggagatgcttctaaggcat

SEQ ID NO: 12 - RNA, 21 nt, synthetic construct
  source 1..21: mol_type = other RNA
gggttttgtagcatttttatt

SEQ ID NO: 13 - RNA, 23 nt, synthetic construct
  source 1..23: mol_type = other RNA
atggaagacatgcaggatcttgg

SEQ ID NO: 14 - RNA, 23 nt, synthetic construct
  source 1..23: mol_type = other RNA
atccagaaagctaagcctccatt

SEQ ID NO: 15 - RNA, 23 nt, synthetic construct
  source 1..23: mol_type = other RNA
aatatcttcaagttacaaaagca

SEQ ID NO: 16 - RNA, 23 nt, synthetic construct
  source 1..23: mol_type = other RNA
aaacccagaataaatatcttcaa

SEQ ID NO: 17 - RNA, 23 nt, synthetic construct
  source 1..23: mol_type = other RNA
ttaataaaaatgctacaaaaccc

SEQ ID NO: 18 - RNA, 23 nt, synthetic construct
  source 1..23: mol_type = other RNA
aagacatgcaggatcttggtgag

SEQ ID NO: 19 - RNA, 23 nt, synthetic construct
  source 1..23: mol_type = other RNA
aataaactccaggcctatgaggg

SEQ ID NO: 20 - RNA, 23 nt, synthetic construct
  source 1..23: mol_type = other RNA
tttccgaataaactccaggccta

SEQ ID NO: 21 - RNA, 23 nt, synthetic construct
  source 1..23: mol_type = other RNA
tgtgacacaaagcaggtgctgca

SEQ ID NO: 22 - RNA, 23 nt, synthetic construct
  source 1..23: mol_type = other RNA
cttgactttgcattccagacctg

SEQ ID NO: 23 - RNA, 23 nt, synthetic construct
  source 1..23: mol_type = other RNA
atgccttagaagcatctccgcca

SEQ ID NO: 24 - RNA, 23 nt, synthetic construct
  source 1..23: mol_type = other RNA
aataaaaatgctacaaaacccag

SEQ ID NO: 25 - RNA, 21 nt, synthetic construct
  source 1..21: mol_type = other RNA
gggatacctcaccaagatcct

SEQ ID NO: 26 - RNA, 21 nt, synthetic construct
  source 1..21: mol_type = other RNA
atacctcaccaagatcctgca

SEQ ID NO: 27 - RNA, 21 nt, synthetic construct
  source 1..21: mol_type = other RNA
caagatcctgcatgtcttcca

SEQ ID NO: 28 - RNA, 21 nt, synthetic construct
  source 1..21: mol_type = other RNA
ggcttcctggtgaagatgagt

SEQ ID NO: 29 - RNA, 21 nt, synthetic construct
  source 1..21: mol_type = other RNA
gctggagctggccttgaagtt

SEQ ID NO: 30 - RNA, 21 nt, synthetic construct
  source 1..21: mol_type = other RNA
cctggagtttattcggaaaag

SEQ ID NO: 31 - RNA, 21 nt, synthetic construct
  source 1..21: mol_type = other RNA
gccagctggtccagcctgtgg

SEQ ID NO: 32 - RNA, 21 nt, synthetic construct
  source 1..21: mol_type = other RNA
actggtggtgctgctgcccct

SEQ ID NO: 33 - RNA, 21 nt, synthetic construct
  source 1..21: mol_type = other RNA
tgcccctggcgggtgggtaca

SEQ ID NO: 34 - RNA, 21 nt, synthetic construct
  source 1..21: mol_type = other RNA
tgggtacagccgcgtcctcaa

SEQ ID NO: 35 - RNA, 21 nt, synthetic construct
  source 1..21: mol_type = other RNA
cgtcctcaacgccgcctgcca

SEQ ID NO: 36 - RNA, 21 nt, synthetic construct
  source 1..21: mol_type = other RNA
ggtcgtgctggtcaccgctgc

SEQ ID NO: 37 - RNA, 21 nt, synthetic construct
  source 1..21: mol_type = other RNA
aggacatcattggtgcctcca

SEQ ID NO: 38 - RNA, 21 nt, synthetic construct
  source 1..21: mol_type = other RNA
tcattggtgcctccagcgact

SEQ ID NO: 39 - RNA, 21 nt, synthetic construct
  source 1..21: mol_type = other RNA
gtgcctccagcgactgcagca

SEQ ID NO: 40 - RNA, 21 nt, synthetic construct
  source 1..21: mol_type = other RNA
agcgactgcagcacctgcttt

SEQ ID NO: 41 - RNA, 21 nt, synthetic construct
  source 1..21: mol_type = other RNA
gcacctgctttgtgtcacaga

SEQ ID NO: 42 - RNA, 21 nt, synthetic construct
  source 1..21: mol_type = other RNA
ctttgtgtcacagagtgggac

SEQ ID NO: 43 - RNA, 21 nt, synthetic construct
  source 1..21: mol_type = other RNA
agtgggacatcacaggctgct

SEQ ID NO: 44 - RNA, 21 nt, synthetic construct
  source 1..21: mol_type = other RNA
atcacaggctgctgcccacgt

SEQ ID NO: 45 - RNA, 21 nt, synthetic construct
  source 1..21: mol_type = other RNA
tgtctgccgagccggagctca

SEQ ID NO: 46 - RNA, 21 nt, synthetic construct
  source 1..21: mol_type = other RNA
ggccgagttgaggcagagact

SEQ ID NO: 47 - RNA, 21 nt, synthetic construct
  source 1..21: mol_type = other RNA
catccacgcttcctgctgcca

SEQ ID NO: 48 - RNA, 21 nt, synthetic construct
  source 1..21: mol_type = other RNA
cccaggtctggaatgcaaagt

SEQ ID NO: 49 - RNA, 21 nt, synthetic construct
  source 1..21: mol_type = other RNA
aggtctggaatgcaaagtcaa

SEQ ID NO: 50 - RNA, 21 nt, synthetic construct
  source 1..21: mol_type = other RNA
gaatgcaaagtcaaggagcat

SEQ ID NO: 51 - RNA, 21 nt, synthetic construct
  source 1..21: mol_type = other RNA
caaagtcaaggagcatggaat

SEQ ID NO: 52 - RNA, 21 nt, synthetic construct
  source 1..21: mol_type = other RNA
ccctcaggagcaggtgaccgt

SEQ ID NO: 53 - RNA, 21 nt, synthetic construct
  source 1..21: mol_type = other RNA
gaggagggctggaccctgact

SEQ ID NO: 54 - RNA, 21 nt, synthetic construct
  source 1..21: mol_type = other RNA
gctgcagtgccctccctggga

SEQ ID NO: 55 - RNA, 21 nt, synthetic construct
  source 1..21: mol_type = other RNA
cctccctgggacctcccacgt

SEQ ID NO: 56 - RNA, 21 nt, synthetic construct
  source 1..21: mol_type = other RNA
ccctgggacctcccacgtcct

SEQ ID NO: 57 - RNA, 21 nt, synthetic construct
  source 1..21: mol_type = other RNA
gggcctacgccgtagacaaca

SEQ ID NO: 58 - RNA, 21 nt, synthetic construct
  source 1..21: mol_type = other RNA
gccgtagacaacacgtgtgta

SEQ ID NO: 59 - RNA, 21 nt, synthetic construct
  source 1..21: mol_type = other RNA
ccgtagacaacacgtgtgtag

SEQ ID NO: 60 - RNA, 21 nt, synthetic construct
  source 1..21: mol_type = other RNA
tagacaacacgtgtgtagtca

SEQ ID NO: 61 - RNA, 21 nt, synthetic construct
  source 1..21: mol_type = other RNA
gtgtgtagtcaggagccggga

SEQ ID NO: 62 - RNA, 21 nt, synthetic construct
  source 1..21: mol_type = other RNA
gagccgggacgtcagcactac

SEQ ID NO: 63 - RNA, 21 nt, synthetic construct
  source 1..21: mol_type = other RNA
tcagcactacaggcagcacca

SEQ ID NO: 64 - RNA, 21 nt, synthetic construct
  source 1..21: mol_type = other RNA
tctccagctaactgtggagaa

SEQ ID NO: 65 - RNA, 21 nt, synthetic construct
  source 1..21: mol_type = other RNA
gctccctgattaatggaggct

SEQ ID NO: 66 - RNA, 21 nt, synthetic construct
  source 1..21: mol_type = other RNA
tccctgattaatggaggctta

SEQ ID NO: 67 - RNA, 21 nt, synthetic construct
  source 1..21: mol_type = other RNA
cctgattaatggaggcttagc

SEQ ID NO: 68 - RNA, 21 nt, synthetic construct
  source 1..21: mol_type = other RNA
gattaatggaggcttagcttt

SEQ ID NO: 69 - RNA, 21 nt, synthetic construct
  source 1..21: mol_type = other RNA
ggtggtcacaggctgtgcctt

SEQ ID NO: 70 - RNA, 21 nt, synthetic construct
  source 1..21: mol_type = other RNA
tcacaggctgtgccttggttt

SEQ ID NO: 71 - RNA, 21 nt, synthetic construct
  source 1..21: mol_type = other RNA
gtgccttggtttcctgagcca

SEQ ID NO: 72 - RNA, 21 nt, synthetic construct
  source 1..21: mol_type = other RNA
agccacctttactctgctcta

SEQ ID NO: 73 - RNA, 21 nt, synthetic construct
  source 1..21: mol_type = other RNA
ccacctttactctgctctatg

SEQ ID NO: 74 - RNA, 21 nt, synthetic construct
  source 1..21: mol_type = other RNA
ctttactctgctctatgccag

SEQ ID NO: 75 - RNA, 21 nt, synthetic construct
  source 1..21: mol_type = other RNA
gctgtgctagcaacacccaaa

SEQ ID NO: 76 - RNA, 21 nt, synthetic construct
  source 1..21: mol_type = other RNA
tcacctaggactgactcggca

SEQ ID NO: 77 - RNA, 21 nt, synthetic construct
  source 1..21: mol_type = other RNA
actgactcggcagtgtgcagt

SEQ ID NO: 78 - RNA, 21 nt, synthetic construct
  source 1..21: mol_type = other RNA
tcggcagtgtgcagtggtgca

SEQ ID NO: 79 - RNA, 21 nt, synthetic construct
  source 1..21: mol_type = other RNA
ggcagtgtgcagtggtgcatg

SEQ ID NO: 80 - RNA, 21 nt, synthetic construct
  source 1..21: mol_type = other RNA
gcagtggtgcatgcactgtct

SEQ ID NO: 81 - RNA, 21 nt, synthetic construct
  source 1..21: mol_type = other RNA
gtgcatgcactgtctcagcca

SEQ ID NO: 82 - RNA, 21 nt, synthetic construct
  source 1..21: mol_type = other RNA
aacccgctccactacccggca

SEQ ID NO: 83 - RNA, 21 nt, synthetic construct
  source 1..21: mol_type = other RNA
actacccggcagggtacacat

SEQ ID NO: 84 - RNA, 21 nt, synthetic construct
  source 1..21: mol_type = other RNA
cctacttcacagaggaagaaa

SEQ ID NO: 85 - RNA, 21 nt, synthetic construct
  source 1..21: mol_type = other RNA
ccaggaagctcggtgagtgat

SEQ ID NO: 86 - RNA, 21 nt, synthetic construct
  source 1..21: mol_type = other RNA
agaacgatgcctgcaggcatg

SEQ ID NO: 87 - RNA, 21 nt, synthetic construct
  source 1..21: mol_type = other RNA
tgcctgcaggcatggaacttt

SEQ ID NO: 88 - RNA, 21 nt, synthetic construct
  source 1..21: mol_type = other RNA
cgttatcacccaggcctgatt

SEQ ID NO: 89 - RNA, 21 nt, synthetic construct
  source 1..21: mol_type = other RNA
cacccaggcctgattcactgg

SEQ ID NO: 90 - RNA, 21 nt, synthetic construct
  source 1..21: mol_type = other RNA
cggagatgcttctaaggcatg

SEQ ID NO: 91 - RNA, 21 nt, synthetic construct
  source 1..21: mol_type = other RNA
agatgcttctaaggcatggtc

SEQ ID NO: 92 - RNA, 21 nt, synthetic construct
  source 1..21: mol_type = other RNA
acaactgtccctccttgagca

SEQ ID NO: 93 - RNA, 21 nt, synthetic construct
  source 1..21: mol_type = other RNA
cacccaagcaagcagacattt

SEQ ID NO: 94 - RNA, 21 nt, synthetic construct
  source 1..21: mol_type = other RNA
caagcaagcagacatttatct

SEQ ID NO: 95 - RNA, 21 nt, synthetic construct
  source 1..21: mol_type = other RNA
tttgggtctgtcctctctgtt

SEQ ID NO: 96 - RNA, 21 nt, synthetic construct
  source 1..21: mol_type = other RNA
gtctgtcctctctgttgcctt

SEQ ID NO: 97 - RNA, 23 nt, synthetic construct
  source 1..23: mol_type = other RNA
aggatcttggtgaggtatccccg

SEQ ID NO: 98 - RNA, 23 nt, synthetic construct
  source 1..23: mol_type = other RNA
tgcaggatcttggtgaggtatcc

SEQ ID NO: 99 - RNA, 23 nt, synthetic construct
  source 1..23: mol_type = other RNA
tggaagacatgcaggatcttggt

SEQ ID NO: 100 - RNA, 23 nt, synthetic construct
  source 1..23: mol_type = other RNA
actcatcttcaccaggaagccag

SEQ ID NO: 101 - RNA, 23 nt, synthetic construct
  source 1..23: mol_type = other RNA
aacttcaaggccagctccagcag

SEQ ID NO: 102 - RNA, 23 nt, synthetic construct
  source 1..23: mol_type = other RNA
cttttccgaataaactccaggcc

SEQ ID NO: 103 - RNA, 23 nt, synthetic construct
  source 1..23: mol_type = other RNA
ccacaggctggaccagctggctt

SEQ ID NO: 104 - RNA, 23 nt, synthetic construct
  source 1..23: mol_type = other RNA
aggggcagcagcaccaccagtgg

SEQ ID NO: 105 - RNA, 23 nt, synthetic construct
  source 1..23: mol_type = other RNA
tgtacccacccgccaggggcagc

SEQ ID NO: 106 - RNA, 23 nt, synthetic construct
  source 1..23: mol_type = other RNA
ttgaggacgcggctgtacccacc

SEQ ID NO: 107 - RNA, 23 nt, synthetic construct
  source 1..23: mol_type = other RNA
tggcaggcggcgttgaggacgcg

SEQ ID NO: 108 - RNA, 23 nt, synthetic construct
  source 1..23: mol_type = other RNA
gcagcggtgaccagcacgacccc

SEQ ID NO: 109 - RNA, 23 nt, synthetic construct
  source 1..23: mol_type = other RNA
tggaggcaccaatgatgtcctcc

SEQ ID NO: 110 - RNA, 23 nt, synthetic construct
  source 1..23: mol_type = other RNA
agtcgctggaggcaccaatgatg

SEQ ID NO: 111 - RNA, 23 nt, synthetic construct
  source 1..23: mol_type = other RNA
tgctgcagtcgctggaggcacca

SEQ ID NO: 112 - RNA, 23 nt, synthetic construct
  source 1..23: mol_type = other RNA
aaagcaggtgctgcagtcgctgg

SEQ ID NO: 113 - RNA, 23 nt, synthetic construct
  source 1..23: mol_type = other RNA
tctgtgacacaaagcaggtgctg

SEQ ID NO: 114 - RNA, 23 nt, synthetic construct
  source 1..23: mol_type = other RNA
gtcccactctgtgacacaaagca

SEQ ID NO: 115 - RNA, 23 nt, synthetic construct
  source 1..23: mol_type = other RNA
agcagcctgtgatgtcccactct

SEQ ID NO: 116 - RNA, 23 nt, synthetic construct
  source 1..23: mol_type = other RNA
acgtgggcagcagcctgtgatgt

SEQ ID NO: 117 - RNA, 23 nt, synthetic construct
  source 1..23: mol_type = other RNA
tgagctccggctcggcagacagc

SEQ ID NO: 118 - RNA, 23 nt, synthetic construct
  source 1..23: mol_type = other RNA
agtctctgcctcaactcggccag

SEQ ID NO: 119 - RNA, 23 nt, synthetic construct
  source 1..23: mol_type = other RNA
tggcagcaggaagcgtggatgct

SEQ ID NO: 120 - RNA, 23 nt, synthetic construct
  source 1..23: mol_type = other RNA
actttgcattccagacctggggc

SEQ ID NO: 121 - RNA, 23 nt, synthetic construct
  source 1..23: mol_type = other RNA
ttgactttgcattccagacctgg

SEQ ID NO: 122 - RNA, 23 nt, synthetic construct
  source 1..23: mol_type = other RNA
atgctccttgactttgcattcca

SEQ ID NO: 123 - RNA, 23 nt, synthetic construct
  source 1..23: mol_type = other RNA
attccatgctccttgactttgca

SEQ ID NO: 124 - RNA, 23 nt, synthetic construct
  source 1..23: mol_type = other RNA
acggtcacctgctcctgaggggc

SEQ ID NO: 125 - RNA, 23 nt, synthetic construct
  source 1..23: mol_type = other RNA
agtcagggtccagccctcctcgc

SEQ ID NO: 126 - RNA, 23 nt, synthetic construct
  source 1..23: mol_type = other RNA
tcccagggagggcactgcagcca

SEQ ID NO: 127 - RNA, 23 nt, synthetic construct
  source 1..23: mol_type = other RNA
acgtgggaggtcccagggagggc

SEQ ID NO: 128 - RNA, 23 nt, synthetic construct
  source 1..23: mol_type = other RNA
aggacgtgggaggtcccagggag

SEQ ID NO: 129 - RNA, 23 nt, synthetic construct
  source 1..23: mol_type = other RNA
tgttgtctacggcgtaggccccc

SEQ ID NO: 130 - RNA, 23 nt, synthetic construct
  source 1..23: mol_type = other RNA
tacacacgtgttgtctacggcgt

SEQ ID NO: 131 - RNA, 23 nt, synthetic construct
  source 1..23: mol_type = other RNA
ctacacacgtgttgtctacggcg

SEQ ID NO: 132 - RNA, 23 nt, synthetic construct
  source 1..23: mol_type = other RNA
tgactacacacgtgttgtctacg

SEQ ID NO: 133 - RNA, 23 nt, synthetic construct
  source 1..23: mol_type = other RNA
tcccggctcctgactacacacgt

SEQ ID NO: 134 - RNA, 23 nt, synthetic construct
  source 1..23: mol_type = other RNA
gtagtgctgacgtcccggctcct

SEQ ID NO: 135 - RNA, 23 nt, synthetic construct
  source 1..23: mol_type = other RNA
tggtgctgcctgtagtgctgacg

SEQ ID NO: 136 - RNA, 23 nt, synthetic construct
  source 1..23: mol_type = other RNA
ttctccacagttagctggagatg

SEQ ID NO: 137 - RNA, 23 nt, synthetic construct
  source 1..23: mol_type = other RNA
agcctccattaatcagggagccc

SEQ ID NO: 138 - RNA, 23 nt, synthetic construct
  source 1..23: mol_type = other RNA
taagcctccattaatcagggagc

SEQ ID NO: 139 - RNA, 23 nt, synthetic construct
  source 1..23: mol_type = other RNA
gctaagcctccattaatcaggga

SEQ ID NO: 140 - RNA, 23 nt, synthetic construct
  source 1..23: mol_type = other RNA
aaagctaagcctccattaatcag

SEQ ID NO: 141 - RNA, 23 nt, synthetic construct
  source 1..23: mol_type = other RNA
aaggcacagcctgtgaccaccag

SEQ ID NO: 142 - RNA, 23 nt, synthetic construct
  source 1..23: mol_type = other RNA
aaaccaaggcacagcctgtgacc

SEQ ID NO: 143 - RNA, 23 nt, synthetic construct
  source 1..23: mol_type = other RNA
tggctcaggaaaccaaggcacag

SEQ ID NO: 144 - RNA, 23 nt, synthetic construct
  source 1..23: mol_type = other RNA
tagagcagagtaaaggtggctca

SEQ ID NO: 145 - RNA, 23 nt, synthetic construct
  source 1..23: mol_type = other RNA
catagagcagagtaaaggtggct

SEQ ID NO: 146 - RNA, 23 nt, synthetic construct
  source 1..23: mol_type = other RNA
ctggcatagagcagagtaaaggt

SEQ ID NO: 147 - RNA, 23 nt, synthetic construct
  source 1..23: mol_type = other RNA
tttgggtgttgctagcacagcct

SEQ ID NO: 148 - RNA, 23 nt, synthetic construct
  source 1..23: mol_type = other RNA
tgccgagtcagtcctaggtgatg

SEQ ID NO: 149 - RNA, 23 nt, synthetic construct
  source 1..23: mol_type = other RNA
actgcacactgccgagtcagtcc

SEQ ID NO: 150 - RNA, 23 nt, synthetic construct
  source 1..23: mol_type = other RNA
tgcaccactgcacactgccgagt

SEQ ID NO: 151 - RNA, 23 nt, synthetic construct
  source 1..23: mol_type = other RNA
catgcaccactgcacactgccga

SEQ ID NO: 152 - RNA, 23 nt, synthetic construct
  source 1..23: mol_type = other RNA
agacagtgcatgcaccactgcac

SEQ ID NO: 153 - RNA, 23 nt, synthetic construct
  source 1..23: mol_type = other RNA
tggctgagacagtgcatgcacca

SEQ ID NO: 154 - RNA, 23 nt, synthetic construct
  source 1..23: mol_type = other RNA
tgccgggtagtggagcgggttgg

SEQ ID NO: 155 - RNA, 23 nt, synthetic construct
  source 1..23: mol_type = other RNA
atgtgtaccctgccgggtagtgg

SEQ ID NO: 156 - RNA, 23 nt, synthetic construct
  source 1..23: mol_type = other RNA
tttcttcctctgtgaagtagggg

SEQ ID NO: 157 - RNA, 23 nt, synthetic construct
  source 1..23: mol_type = other RNA
atcactcaccgagcttcctggtc

SEQ ID NO: 158 - RNA, 23 nt, synthetic construct
  source 1..23: mol_type = other RNA
catgcctgcaggcatcgttctgc

SEQ ID NO: 159 - RNA, 23 nt, synthetic construct
  source 1..23: mol_type = other RNA
aaagttccatgcctgcaggcatc

SEQ ID NO: 160 - RNA, 23 nt, synthetic construct
  source 1..23: mol_type = other RNA
aatcaggcctgggtgataacgga

SEQ ID NO: 161 - RNA, 23 nt, synthetic construct
  source 1..23: mol_type = other RNA
ccagtgaatcaggcctgggtgat

SEQ ID NO: 162 - RNA, 23 nt, synthetic construct
  source 1..23: mol_type = other RNA
catgccttagaagcatctccgcc

SEQ ID NO: 163 - RNA, 23 nt, synthetic construct
  source 1..23: mol_type = other RNA
gaccatgccttagaagcatctcc

SEQ ID NO: 164 - RNA, 23 nt, synthetic construct
  source 1..23: mol_type = other RNA
tgctcaaggagggacagttgttg

SEQ ID NO: 165 - RNA, 23 nt, synthetic construct
  source 1..23: mol_type = other RNA
aaatgtctgcttgcttgggtggg

SEQ ID NO: 166 - RNA, 23 nt, synthetic construct
  source 1..23: mol_type = other RNA
agataaatgtctgcttgcttggg

SEQ ID NO: 167 - RNA, 23 nt, synthetic construct
  source 1..23: mol_type = other RNA
aacagagaggacagacccaaaag

SEQ ID NO: 168 - RNA, 23 nt, synthetic construct
  source 1..23: mol_type = other RNA
aaggcaacagagaggacagaccc

SEQ ID NO: 169 - RNA, 21 nt, synthetic construct
  source 1..21: mol_type = other RNA
  modified_base 1: mod_base = OTHER; note = 2'-fluoro nucleoside with phosphorothioate bond
  modified_base 2: mod_base = OTHER; note = 2'-O-methoxy nucleoside with phosphorothioate bond
  modified_base 3: mod_base = OTHER; note = 2'-fluoro nucleoside
  modified_base 4: mod_base = OTHER; note = 2'-O-methoxy nucleoside
  modified_base 5: mod_base = OTHER; note = 2'-fluoro nucleoside
  modified_base 6: mod_base = OTHER; note = 2'-O-methoxy nucleoside
  modified_base 7: mod_base = OTHER; note = 2'-fluoro nucleoside
  modified_base 8: mod_base = OTHER; note = 2'-O-methoxy nucleoside
  modified_base 9: mod_base = OTHER; note = 2'-fluoro nucleoside
  modified_base 10: mod_base = OTHER; note = 2'-O-methoxy nucleoside
  modified_base 11: mod_base = OTHER; note = 2'-fluoro nucleoside
  modified_base 12: mod_base = OTHER; note = 2'-O-methoxy nucleoside
  modified_base 13: mod_base = OTHER; note = 2'-fluoro nucleoside
  modified_base 14: mod_base = OTHER; note = 2'-O-methoxy nucleoside
  modified_base 15: mod_base = OTHER; note = 2'-fluoro nucleoside
  modified_base 16: mod_base = OTHER; note = 2'-O-methoxy nucleoside
  modified_base 17: mod_base = OTHER; note = 2'-fluoro nucleoside
  modified_base 18: mod_base = OTHER; note = 2'-O-methoxy nucleoside
  modified_base 19: mod_base = OTHER; note = 2'-fluoro nucleoside
  modified_base 20: mod_base = OTHER; note = 2'-O-methoxy nucleoside
  modified_base 21: mod_base = OTHER; note = 2'-fluoro nucleoside
aagatcctgcatgtcttccat

SEQ ID NO: 170 - RNA, 21 nt, synthetic construct
  source 1..21: mol_type = other RNA
  modified_base 1: mod_base = OTHER; note = 2'-fluoro nucleoside with phosphorothioate bond
  modified_base 2: mod_base = OTHER; note = 2'-O-methoxy nucleoside with phosphorothioate bond
  modified_base 3: mod_base = OTHER; note = 2'-fluoro nucleoside
  modified_base 4: mod_base = OTHER; note = 2'-O-methoxy nucleoside
  modified_base 5: mod_base = OTHER; note = 2'-fluoro nucleoside
  modified_base 6: mod_base = OTHER; note = 2'-O-methoxy nucleoside
  modified_base 7: mod_base = OTHER; note = 2'-fluoro nucleoside
  modified_base 8: mod_base = OTHER; note = 2'-O-methoxy nucleoside
  modified_base 9: mod_base = OTHER; note = 2'-fluoro nucleoside
  modified_base 10: mod_base = OTHER; note = 2'-O-methoxy nucleoside
  modified_base 11: mod_base = OTHER; note = 2'-fluoro nucleoside
  modified_base 12: mod_base = OTHER; note = 2'-O-methoxy nucleoside
  modified_base 13: mod_base = OTHER; note = 2'-fluoro nucleoside
  modified_base 14: mod_base = OTHER; note = 2'-O-methoxy nucleoside
  modified_base 15: mod_base = OTHER; note = 2'-fluoro nucleoside
  modified_base 16: mod_base = OTHER; note = 2'-O-methoxy nucleoside
  modified_base 17: mod_base = OTHER; note = 2'-fluoro nucleoside
  modified_base 18: mod_base = OTHER; note = 2'-O-methoxy nucleoside
  modified_base 19: mod_base = OTHER; note = 2'-fluoro nucleoside
  modified_base 20: mod_base = OTHER; note = 2'-O-methoxy nucleoside
  modified_base 21: mod_base = OTHER; note = 2'-fluoro nucleoside
tggaggcttagctttctggat

SEQ ID NO: 171 - RNA, 21 nt, synthetic construct
  source 1..21: mol_type = other RNA
  modified_base 1: mod_base = OTHER; note = 2'-fluoro nucleoside with phosphorothioate bond
  modified_base 2: mod_base = OTHER; note = 2'-O-methoxy nucleoside with phosphorothioate bond
  modified_base 3: mod_base = OTHER; note = 2'-fluoro nucleoside
  modified_base 4: mod_base = OTHER; note = 2'-O-methoxy nucleoside
  modified_base 5: mod_base = OTHER; note = 2'-fluoro nucleoside
  modified_base 6: mod_base = OTHER; note = 2'-O-methoxy nucleoside
  modified_base 7: mod_base = OTHER; note = 2'-fluoro nucleoside
  modified_base 8: mod_base = OTHER; note = 2'-O-methoxy nucleoside
  modified_base 9: mod_base = OTHER; note = 2'-fluoro nucleoside
  modified_base 10: mod_base = OTHER; note = 2'-O-methoxy nucleoside
  modified_base 11: mod_base = OTHER; note = 2'-fluoro nucleoside
  modified_base 12: mod_base = OTHER; note = 2'-O-methoxy nucleoside
  modified_base 13: mod_base = OTHER; note = 2'-fluoro nucleoside
  modified_base 14: mod_base = OTHER; note = 2'-O-methoxy nucleoside
  modified_base 15: mod_base = OTHER; note = 2'-fluoro nucleoside
  modified_base 16: mod_base = OTHER; note = 2'-O-methoxy nucleoside
  modified_base 17: mod_base = OTHER; note = 2'-fluoro nucleoside
  modified_base 18: mod_base = OTHER; note = 2'-O-methoxy nucleoside
  modified_base 19: mod_base = OTHER; note = 2'-fluoro nucleoside
  modified_base 20: mod_base = OTHER; note = 2'-O-methoxy nucleoside
  modified_base 21: mod_base = OTHER; note = 2'-fluoro nucleoside
cttttgtaacttgaagatatt

SEQ ID NO: 172 - RNA, 21 nt, synthetic construct
  source 1..21: mol_type = other RNA
  modified_base 1: mod_base = OTHER; note = 2'-fluoro nucleoside with phosphorothioate bond
  modified_base 2: mod_base = OTHER; note = 2'-O-methoxy nucleoside with phosphorothioate bond
  modified_base 3: mod_base = OTHER; note = 2'-fluoro nucleoside
  modified_base 4: mod_base = OTHER; note = 2'-O-methoxy nucleoside
  modified_base 5: mod_base = OTHER; note = 2'-fluoro nucleoside
  modified_base 6: mod_base = OTHER; note = 2'-O-methoxy nucleoside
  modified_base 7: mod_base = OTHER; note = 2'-fluoro nucleoside
  modified_base 8: mod_base = OTHER; note = 2'-O-methoxy nucleoside
  modified_base 9: mod_base = OTHER; note = 2'-fluoro nucleoside
  modified_base 10: mod_base = OTHER; note = 2'-O-methoxy nucleoside
  modified_base 11: mod_base = OTHER; note = 2'-fluoro nucleoside
  modified_base 12: mod_base = OTHER; note = 2'-O-methoxy nucleoside
  modified_base 13: mod_base = OTHER; note = 2'-fluoro nucleoside
  modified_base 14: mod_base = OTHER; note = 2'-O-methoxy nucleoside
  modified_base 15: mod_base = OTHER; note = 2'-fluoro nucleoside
  modified_base 16: mod_base = OTHER; note = 2'-O-methoxy nucleoside
  modified_base 17: mod_base = OTHER; note = 2'-fluoro nucleoside
  modified_base 18: mod_base = OTHER; note = 2'-O-methoxy nucleoside
  modified_base 19: mod_base = OTHER; note = 2'-fluoro nucleoside
  modified_base 20: mod_base = OTHER; note = 2'-O-methoxy nucleoside
  modified_base 21: mod_base = OTHER; note = 2'-fluoro nucleoside
gaagatatttattctgggttt

SEQ ID NO: 173 - RNA, 21 nt, synthetic construct
  source 1..21: mol_type = other RNA
  modified_base 1: mod_base = OTHER; note = 2'-fluoro nucleoside with phosphorothioate bond
  modified_base 2: mod_base = OTHER; note = 2'-O-methoxy nucleoside with phosphorothioate bond
  modified_base 3: mod_base = OTHER; note = 2'-fluoro nucleoside
  modified_base 4: mod_base = OTHER; note = 2'-O-methoxy nucleoside
  modified_base 5: mod_base = OTHER; note = 2'-fluoro nucleoside
  modified_base 6: mod_base = OTHER; note = 2'-O-methoxy nucleoside
  modified_base 7: mod_base = OTHER; note = 2'-fluoro nucleoside
  modified_base 8: mod_base = OTHER; note = 2'-O-methoxy nucleoside
  modified_base 9: mod_base = OTHER; note = 2'-fluoro nucleoside
  modified_base 10: mod_base = OTHER; note = 2'-O-methoxy nucleoside
  modified_base 11: mod_base = OTHER; note = 2'-fluoro nucleoside
  modified_base 12: mod_base = OTHER; note = 2'-O-methoxy nucleoside
  modified_base 13: mod_base = OTHER; note = 2'-fluoro nucleoside
  modified_base 14: mod_base = OTHER; note = 2'-O-methoxy nucleoside
  modified_base 15: mod_base = OTHER; note = 2'-fluoro nucleoside
  modified_base 16: mod_base = OTHER; note = 2'-O-methoxy nucleoside
  modified_base 17: mod_base = OTHER; note = 2'-fluoro nucleoside
  modified_base 18: mod_base = OTHER; note = 2'-O-methoxy nucleoside
  modified_base 19: mod_base = OTHER; note = 2'-fluoro nucleoside
  modified_base 20: mod_base = OTHER; note = 2'-O-methoxy nucleoside
  modified_base 21: mod_base = OTHER; note = 2'-fluoro nucleoside
gttttgtagcatttttattaa

SEQ ID NO: 174 - RNA, 21 nt, synthetic construct
  source 1..21: mol_type = other RNA
  modified_base 1: mod_base = OTHER; note = 2'-fluoro nucleoside with phosphorothioate bond
  modified_base 2: mod_base = OTHER; note = 2'-O-methoxy nucleoside with phosphorothioate bond
  modified_base 3: mod_base = OTHER; note = 2'-fluoro nucleoside
  modified_base 4: mod_base = OTHER; note = 2'-O-methoxy nucleoside
  modified_base 5: mod_base = OTHER; note = 2'-fluoro nucleoside
  modified_base 6: mod_base = OTHER; note = 2'-O-methoxy nucleoside
  modified_base 7: mod_base = OTHER; note = 2'-fluoro nucleoside
  modified_base 8: mod_base = OTHER; note = 2'-O-methoxy nucleoside
  modified_base 9: mod_base = OTHER; note = 2'-fluoro nucleoside
  modified_base 10: mod_base = OTHER; note = 2'-O-methoxy nucleoside
  modified_base 11: mod_base = OTHER; note = 2'-fluoro nucleoside
  modified_base 12: mod_base = OTHER; note = 2'-O-methoxy nucleoside
  modified_base 13: mod_base = OTHER; note = 2'-fluoro nucleoside
  modified_base 14: mod_base = OTHER; note = 2'-O-methoxy nucleoside
  modified_base 15: mod_base = OTHER; note = 2'-fluoro nucleoside
  modified_base 16: mod_base = OTHER; note = 2'-O-methoxy nucleoside
  modified_base 17: mod_base = OTHER; note = 2'-fluoro nucleoside
  modified_base 18: mod_base = OTHER; note = 2'-O-methoxy nucleoside
  modified_base 19: mod_base = OTHER; note = 2'-fluoro nucleoside
  modified_base 20: mod_base = OTHER; note = 2'-O-methoxy nucleoside
  modified_base 21: mod_base = OTHER; note = 2'-fluoro nucleoside
caccaagatcctgcatgtctt

SEQ ID NO: 175 - RNA, 21 nt, synthetic construct
  source 1..21: mol_type = other RNA
  modified_base 1: mod_base = OTHER; note = 2'-fluoro nucleoside with phosphorothioate bond
  modified_base 2: mod_base = OTHER; note = 2'-O-methoxy nucleoside with phosphorothioate bond
  modified_base 3: mod_base = OTHER; note = 2'-fluoro nucleoside
  modified_base 4: mod_base = OTHER; note = 2'-O-methoxy nucleoside
  modified_base 5: mod_base = OTHER; note = 2'-fluoro nucleoside
  modified_base 6: mod_base = OTHER; note = 2'-O-methoxy nucleoside
  modified_base 7: mod_base = OTHER; note = 2'-fluoro nucleoside
  modified_base 8: mod_base = OTHER; note = 2'-O-methoxy nucleoside
  modified_base 9: mod_base = OTHER; note = 2'-fluoro nucleoside
  modified_base 10: mod_base = OTHER; note = 2'-O-methoxy nucleoside
  modified_base 11: mod_base = OTHER; note = 2'-fluoro nucleoside
  modified_base 12: mod_base = OTHER; note = 2'-O-methoxy nucleoside
  modified_base 13: mod_base = OTHER; note = 2'-fluoro nucleoside
  modified_base 14: mod_base = OTHER; note = 2'-O-methoxy nucleoside
  modified_base 15: mod_base = OTHER; note = 2'-fluoro nucleoside
  modified_base 16: mod_base = OTHER; note = 2'-O-methoxy nucleoside
  modified_base 17: mod_base = OTHER; note = 2'-fluoro nucleoside
  modified_base 18: mod_base = OTHER; note = 2'-O-methoxy nucleoside
  modified_base 19: mod_base = OTHER; note = 2'-fluoro nucleoside
  modified_base 20: mod_base = OTHER; note = 2'-O-methoxy nucleoside
  modified_base 21: mod_base = OTHER; note = 2'-fluoro nucleoside
ctcataggcctggagtttatt

SEQ ID NO: 176 - RNA, 21 nt, synthetic construct
  source 1..21: mol_type = other RNA
  modified_base 1: mod_base = OTHER; note = 2'-fluoro nucleoside with phosphorothioate bond
  modified_base 2: mod_base = OTHER; note = 2'-O-methoxy nucleoside with phosphorothioate bond
  modified_base 3: mod_base = OTHER; note = 2'-fluoro nucleoside
  modified_base 4: mod_base = OTHER; note = 2'-O-methoxy nucleoside
  modified_base 5: mod_base = OTHER; note = 2'-fluoro nucleoside
  modified_base 6: mod_base = OTHER; note = 2'-O-methoxy nucleoside
  modified_base 7: mod_base = OTHER; note = 2'-fluoro nucleoside
  modified_base 8: mod_base = OTHER; note = 2'-O-methoxy nucleoside
  modified_base 9: mod_base = OTHER; note = 2'-fluoro nucleoside
  modified_base 10: mod_base = OTHER; note = 2'-O-methoxy nucleoside
  modified_base 11: mod_base = OTHER; note = 2'-fluoro nucleoside
  modified_base 12: mod_base = OTHER; note = 2'-O-methoxy nucleoside
  modified_base 13: mod_base = OTHER; note = 2'-fluoro nucleoside
  modified_base 14: mod_base = OTHER; note = 2'-O-methoxy nucleoside
  modified_base 15: mod_base = OTHER; note = 2'-fluoro nucleoside
  modified_base 16: mod_base = OTHER; note = 2'-O-methoxy nucleoside
  modified_base 17: mod_base = OTHER; note = 2'-fluoro nucleoside
  modified_base 18: mod_base = OTHER; note = 2'-O-methoxy nucleoside
  modified_base 19: mod_base = OTHER; note = 2'-fluoro nucleoside
  modified_base 20: mod_base = OTHER; note = 2'-O-methoxy nucleoside
  modified_base 21: mod_base = OTHER; note = 2'-fluoro nucleoside
ggcctggagtttattcggaaa

SEQ ID NO: 177 - RNA, 21 nt, synthetic construct
  source 1..21: mol_type = other RNA
  modified_base 1: mod_base = OTHER; note = 2'-fluoro nucleoside with phosphorothioate bond
  modified_base 2: mod_base = OTHER; note = 2'-O-methoxy nucleoside with phosphorothioate bond
  modified_base 3: mod_base = OTHER; note = 2'-fluoro nucleoside
  modified_base 4: mod_base = OTHER; note = 2'-O-methoxy nucleoside
  modified_base 5: mod_base = OTHER; note = 2'-fluoro nucleoside
  modified_base 6: mod_base = OTHER; note = 2'-O-methoxy nucleoside
  modified_base 7: mod_base = OTHER; note = 2'-fluoro nucleoside
  modified_base 8: mod_base = OTHER; note = 2'-O-methoxy nucleoside
  modified_base 9: mod_base = OTHER; note = 2'-fluoro nucleoside
  modified_base 10: mod_base = OTHER; note = 2'-O-methoxy nucleoside
  modified_base 11: mod_base = OTHER; note = 2'-fluoro nucleoside
  modified_base 12: mod_base = OTHER; note = 2'-O-methoxy nucleoside
  modified_base 13: mod_base = OTHER; note = 2'-fluoro nucleoside
  modified_base 14: mod_base = OTHER; note = 2'-O-methoxy nucleoside
  modified_base 15: mod_base = OTHER; note = 2'-fluoro nucleoside
  modified_base 16: mod_base = OTHER; note = 2'-O-methoxy nucleoside
  modified_base 17: mod_base = OTHER; note = 2'-fluoro nucleoside
  modified_base 18: mod_base = OTHER; note = 2'-O-methoxy nucleoside
  modified_base 19: mod_base = OTHER; note = 2'-fluoro nucleoside
  modified_base 20: mod_base = OTHER; note = 2'-O-methoxy nucleoside
  modified_base 21: mod_base = OTHER; note = 2'-fluoro nucleoside
cagcacctgctttgtgtcaca

SEQ ID NO: 178 - RNA, 21 nt, synthetic construct
  source 1..21: mol_type = other RNA
  modified_base 1: mod_base = OTHER; note = 2'-fluoro nucleoside with phosphorothioate bond
  modified_base 2: mod_base = OTHER; note = 2'-O-methoxy nucleoside with phosphorothioate bond
  modified_base 3: mod_base = OTHER; note = 2'-fluoro nucleoside
  modified_base 4: mod_base = OTHER; note = 2'-O-methoxy nucleoside
  modified_base 5: mod_base = OTHER; note = 2'-fluoro nucleoside
  modified_base 6: mod_base = OTHER; note = 2'-O-methoxy nucleoside
  modified_base 7: mod_base = OTHER; note = 2'-fluoro nucleoside
  modified_base 8: mod_base = OTHER; note = 2'-O-methoxy nucleoside
  modified_base 9: mod_base = OTHER; note = 2'-fluoro nucleoside
  modified_base 10: mod_base = OTHER; note = 2'-O-methoxy nucleoside
  modified_base 11: mod_base = OTHER; note = 2'-fluoro nucleoside
  modified_base 12: mod_base = OTHER; note = 2'-O-methoxy nucleoside
  modified_base 13: mod_base = OTHER; note = 2'-fluoro nucleoside
  modified_base 14: mod_base = OTHER; note = 2'-O-methoxy nucleoside
  modified_base 15: mod_base = OTHER; note = 2'-fluoro nucleoside
  modified_base 16: mod_base = OTHER; note = 2'-O-methoxy nucleoside
  modified_base 17: mod_base = OTHER; note = 2'-fluoro nucleoside
  modified_base 18: mod_base = OTHER; note = 2'-O-methoxy nucleoside
  modified_base 19: mod_base = OTHER; note = 2'-fluoro nucleoside
  modified_base 20: mod_base = OTHER; note = 2'-O-methoxy nucleoside
  modified_base 21: mod_base = OTHER; note = 2'-fluoro nucleoside
ggtctggaatgcaaagtcaag

SEQ ID NO: 179 - RNA, 21 nt, synthetic construct
  source 1..21: mol_type = other RNA
  modified_base 1: mod_base = OTHER; note = 2'-fluoro nucleoside with phosphorothioate bond
  modified_base 2: mod_base = OTHER; note = 2'-O-methoxy nucleoside with phosphorothioate bond
  modified_base 3: mod_base = OTHER; note = 2'-fluoro nucleoside
  modified_base 4: mod_base = OTHER; note = 2'-O-methoxy nucleoside
  modified_base 5: mod_base = OTHER; note = 2'-fluoro nucleoside
  modified_base 6: mod_base = OTHER; note = 2'-O-methoxy nucleoside
  modified_base 7: mod_base = OTHER; note = 2'-fluoro nucleoside
  modified_base 8: mod_base = OTHER; note = 2'-O-methoxy nucleoside
  modified_base 9: mod_base = OTHER; note = 2'-fluoro nucleoside
  modified_base 10: mod_base = OTHER; note = 2'-O-methoxy nucleoside
  modified_base 11: mod_base = OTHER; note = 2'-fluoro nucleoside
  modified_base 12: mod_base = OTHER; note = 2'-O-methoxy nucleoside
  modified_base 13: mod_base = OTHER; note = 2'-fluoro nucleoside
  modified_base 14: mod_base = OTHER; note = 2'-O-methoxy nucleoside
  modified_base 15: mod_base = OTHER; note = 2'-fluoro nucleoside
  modified_base 16: mod_base = OTHER; note = 2'-O-methoxy nucleoside
  modified_base 17: mod_base = OTHER; note = 2'-fluoro nucleoside
  modified_base 18: mod_base = OTHER; note = 2'-O-methoxy nucleoside
  modified_base 19: mod_base = OTHER; note = 2'-fluoro nucleoside
  modified_base 20: mod_base = OTHER; note = 2'-O-methoxy nucleoside
  modified_base 21: mod_base = OTHER; note = 2'-fluoro nucleoside
gcggagatgcttctaaggcat

SEQ ID NO: 180 - RNA, 21 nt, synthetic construct
  source 1..21: mol_type = other RNA
  modified_base 1: mod_base = OTHER; note = 2'-fluoro nucleoside with phosphorothioate bond
  modified_base 2: mod_base = OTHER; note = 2'-O-methoxy nucleoside with phosphorothioate bond
  modified_base 3: mod_base = OTHER; note = 2'-fluoro nucleoside
  modified_base 4: mod_base = OTHER; note = 2'-O-methoxy nucleoside
  modified_base 5: mod_base = OTHER; note = 2'-fluoro nucleoside
  modified_base 6: mod_base = OTHER; note = 2'-O-methoxy nucleoside
  modified_base 7: mod_base = OTHER; note = 2'-fluoro nucleoside
  modified_base 8: mod_base = OTHER; note = 2'-O-methoxy nucleoside
  modified_base 9: mod_base = OTHER; note = 2'-fluoro nucleoside
  modified_base 10: mod_base = OTHER; note = 2'-O-methoxy nucleoside
  modified_base 11: mod_base = OTHER; note = 2'-fluoro nucleoside
  modified_base 12: mod_base = OTHER; note = 2'-O-methoxy nucleoside
  modified_base 13: mod_base = OTHER; note = 2'-fluoro nucleoside
  modified_base 14: mod_base = OTHER; note = 2'-O-methoxy nucleoside
  modified_base 15: mod_base = OTHER; note = 2'-fluoro nucleoside
  modified_base 16: mod_base = OTHER; note = 2'-O-methoxy nucleoside
  modified_base 17: mod_base = OTHER; note = 2'-fluoro nucleoside
  modified_base 18: mod_base = OTHER; note = 2'-O-methoxy nucleoside
  modified_base 19: mod_base = OTHER; note = 2'-fluoro nucleoside
  modified_base 20: mod_base = OTHER; note = 2'-O-methoxy nucleoside
  modified_base 21: mod_base = OTHER; note = 2'-fluoro nucleoside
gggttttgtagcatttttatt

SEQ ID NO: 181 - RNA, 23 nt, synthetic construct
  source 1..23: mol_type = other RNA
  modified_base 1: mod_base = OTHER; note = 2'-O-methoxy nucleoside with phosphorothioate bond
  modified_base 2: mod_base = OTHER; note = 2'-fluoro nucleoside with phosphorothioate bond
  modified_base 3: mod_base = OTHER; note = 2'-O-methoxy nucleoside
  modified_base 4: mod_base = OTHER; note = 2'-fluoro nucleoside
  modified_base 5: mod_base = OTHER; note = 2'-O-methoxy nucleoside
  modified_base 6: mod_base = OTHER; note = 2'-fluoro nucleoside
  modified_base 7: mod_base = OTHER; note = 2'-O-methoxy nucleoside
  modified_base 8: mod_base = OTHER; note = 2'-fluoro nucleoside
  modified_base 9: mod_base = OTHER; note = 2'-O-methoxy nucleoside
  modified_base 10: mod_base = OTHER; note = 2'-fluoro nucleoside
  modified_base 11: mod_base = OTHER; note = 2'-O-methoxy nucleoside
  modified_base 12: mod_base = OTHER; note = 2'-fluoro nucleoside
  modified_base 13: mod_base = OTHER; note = 2'-O-methoxy nucleoside
  modified_base 14: mod_base = OTHER; note = 2'-fluoro nucleoside
  modified_base 15: mod_base = OTHER; note = 2'-O-methoxy nucleoside
  modified_base 16: mod_base = OTHER; note = 2'-fluoro nucleoside
  modified_base 17: mod_base = OTHER; note = 2'-O-methoxy nucleoside
  modified_base 18: mod_base = OTHER; note = 2'-fluoro nucleoside
  modified_base 19: mod_base = OTHER; note = 2'-O-methoxy nucleoside
  modified_base 20: mod_base = OTHER; note = 2'-fluoro nucleoside
  modified_base 21: mod_base = OTHER; note = 2'-O-methoxy nucleoside with phosphorothioate bond
  modified_base 22: mod_base = OTHER; note = 2'-fluoro nucleoside with phosphorothioate bond
  modified_base 23: mod_base = OTHER; note = 2'-O-methoxy nucleoside
atggaagacatgcaggatcttgg

SEQ ID NO: 182 - RNA, 23 nt, synthetic construct
  source 1..23: mol_type = other RNA
  modified_base 1: mod_base = OTHER; note = 2'-O-methoxy nucleoside with phosphorothioate bond
  modified_base 2: mod_base = OTHER; note = 2'-fluoro nucleoside with phosphorothioate bond
  modified_base 3: mod_base = OTHER; note = 2'-O-methoxy nucleoside
  modified_base 4: mod_base = OTHER; note = 2'-fluoro nucleoside
  modified_base 5: mod_base = OTHER; note = 2'-O-methoxy nucleoside
  modified_base 6: mod_base = OTHER; note = 2'-fluoro nucleoside
  modified_base 7: mod_base = OTHER; note = 2'-O-methoxy nucleoside
  modified_base 8: mod_base = OTHER; note = 2'-fluoro nucleoside
  modified_base 9: mod_base = OTHER; note = 2'-O-methoxy nucleoside
  modified_base 10: mod_base = OTHER; note = 2'-fluoro nucleoside
  modified_base 11: mod_base = OTHER; note = 2'-O-methoxy nucleoside
  modified_base 12: mod_base = OTHER; note = 2'-fluoro nucleoside
  modified_base 13: mod_base = OTHER; note = 2'-O-methoxy nucleoside
  modified_base 14: mod_base = OTHER; note = 2'-fluoro nucleoside
  modified_base 15: mod_base = OTHER; note = 2'-O-methoxy nucleoside
  modified_base 16: mod_base = OTHER; note = 2'-fluoro nucleoside
  modified_base 17: mod_base = OTHER; note = 2'-O-methoxy nucleoside
  modified_base 18: mod_base = OTHER; note = 2'-fluoro nucleoside
  modified_base 19: mod_base = OTHER; note = 2'-O-methoxy nucleoside
  modified_base 20: mod_base = OTHER; note = 2'-fluoro nucleoside
  modified_base 21: mod_base = OTHER; note = 2'-O-methoxy nucleoside with phosphorothioate bond
  modified_base 22: mod_base = OTHER; note = 2'-fluoro nucleoside with phosphorothioate bond
  modified_base 23: mod_base = OTHER; note = 2'-O-methoxy nucleoside
atccagaaagctaagcctccatt

SEQ ID NO: 183 - RNA, 23 nt, synthetic construct
  source 1..23: mol_type = other RNA
  modified_base 1: mod_base = OTHER; note = 2'-O-methoxy nucleoside with phosphorothioate bond
  modified_base 2: mod_base = OTHER; note = 2'-fluoro nucleoside with phosphorothioate bond
  modified_base 3: mod_base = OTHER; note = 2'-O-methoxy nucleoside
  modified_base 4: mod_base = OTHER; note = 2'-fluoro nucleoside
  modified_base 5: mod_base = OTHER; note = 2'-O-methoxy nucleoside
  modified_base 6: mod_base = OTHER; note = 2'-fluoro nucleoside
  modified_base 7: mod_base = OTHER; note = 2'-O-methoxy nucleoside
  modified_base 8: mod_base = OTHER; note = 2'-fluoro nucleoside
  modified_base 9: mod_base = OTHER; note = 2'-O-methoxy nucleoside
  modified_base 10: mod_base = OTHER; note = 2'-fluoro nucleoside
  modified_base 11: mod_base = OTHER; note = 2'-O-methoxy nucleoside
  modified_base 12: mod_base = OTHER; note = 2'-fluoro nucleoside
  modified_base 13: mod_base = OTHER; note = 2'-O-methoxy nucleoside
  modified_base 14: mod_base = OTHER; note = 2'-fluoro nucleoside
  modified_base 15: mod_base = OTHER; note = 2'-O-methoxy nucleoside
  modified_base 16: mod_base = OTHER; note = 2'-fluoro nucleoside
  modified_base 17: mod_base = OTHER; note = 2'-O-methoxy nucleoside
  modified_base 18: mod_base = OTHER; note = 2'-fluoro nucleoside
  modified_base 19: mod_base = OTHER; note = 2'-O-methoxy nucleoside
  modified_base 20: mod_base = OTHER; note = 2'-fluoro nucleoside
  modified_base 21: mod_base = OTHER; note = 2'-O-methoxy nucleoside with phosphorothioate bond
  modified_base 22: mod_base = OTHER; note = 2'-fluoro nucleoside with phosphorothioate bond
  modified_base 23: mod_base = OTHER; note = 2'-O-methoxy nucleoside
aatatcttcaagttacaaaagca

SEQ ID NO: 184 - RNA, 23 nt, synthetic construct
  source 1..23: mol_type = other RNA
  modified_base 1: mod_base = OTHER; note = 2'-O-methoxy nucleoside with phosphorothioate bond
  modified_base 2: mod_base = OTHER; note = 2'-fluoro nucleoside with phosphorothioate bond
  modified_base 3: mod_base = OTHER; note = 2'-O-methoxy nucleoside
  modified_base 4: mod_base = OTHER; note = 2'-fluoro nucleoside
  modified_base 5: mod_base = OTHER; note = 2'-O-methoxy nucleoside
  modified_base 6: mod_base = OTHER; note = 2'-fluoro nucleoside
  modified_base 7: mod_base = OTHER; note = 2'-O-methoxy nucleoside
  modified_base 8: mod_base = OTHER; note = 2'-fluoro nucleoside
  modified_base 9: mod_base = OTHER; note = 2'-O-methoxy nucleoside
  modified_base 10: mod_base = OTHER; note = 2'-fluoro nucleoside
  modified_base 11: mod_base = OTHER; note = 2'-O-methoxy nucleoside
  modified_base 12: mod_base = OTHER; note = 2'-fluoro nucleoside
  modified_base 13: mod_base = OTHER; note = 2'-O-methoxy nucleoside
  modified_base 14: mod_base = OTHER; note = 2'-fluoro nucleoside
  modified_base 15: mod_base = OTHER; note = 2'-O-methoxy nucleoside
  modified_base 16: mod_base = OTHER; note = 2'-fluoro nucleoside
  modified_base 17: mod_base = OTHER; note = 2'-O-methoxy nucleoside
  modified_base 18: mod_base = OTHER; note = 2'-fluoro nucleoside
  modified_base 19: mod_base = OTHER; note = 2'-O-methoxy nucleoside
  modified_base 20: mod_base = OTHER; note = 2'-fluoro nucleoside
  modified_base 21: mod_base = OTHER; note = 2'-O-methoxy nucleoside with phosphorothioate bond
  modified_base 22: mod_base = OTHER; note = 2'-fluoro nucleoside with phosphorothioate bond
  modified_base 23: mod_base = OTHER; note = 2'-O-methoxy nucleoside
aaacccagaataaatatcttcaa

SEQ ID NO: 185 - RNA, 23 nt, synthetic construct
  source 1..23: mol_type = other RNA
  modified_base 1: mod_base = OTHER; note = 2'-O-methoxy nucleoside with phosphorothioate bond
  modified_base 2: mod_base = OTHER; note = 2'-fluoro nucleoside with phosphorothioate bond
  modified_base 3: mod_base = OTHER; note = 2'-O-methoxy nucleoside
  modified_base 4: mod_base = OTHER; note = 2'-fluoro nucleoside
  modified_base 5: mod_base = OTHER; note = 2'-O-methoxy nucleoside
  modified_base 6: mod_base = OTHER; note = 2'-fluoro nucleoside
  modified_base 7: mod_base = OTHER; note = 2'-O-methoxy nucleoside
  modified_base 8: mod_base = OTHER; note = 2'-fluoro nucleoside
  modified_base 9: mod_base = OTHER; note = 2'-O-methoxy nucleoside
  modified_base 10: mod_base = OTHER; note = 2'-fluoro nucleoside
  modified_base 11: mod_base = OTHER; note = 2'-O-methoxy nucleoside
  modified_base 12: mod_base = OTHER; note = 2'-fluoro nucleoside
  modified_base 13: mod_base = OTHER; note = 2'-O-methoxy nucleoside
  modified_base 14: mod_base = OTHER; note = 2'-fluoro nucleoside
  modified_base 15: mod_base = OTHER; note = 2'-O-methoxy nucleoside
  modified_base 16: mod_base = OTHER; note = 2'-fluoro nucleoside
  modified_base 17: mod_base = OTHER; note = 2'-O-methoxy nucleoside
  modified_base 18: mod_base = OTHER; note = 2'-fluoro nucleoside
  modified_base 19: mod_base = OTHER; note = 2'-O-methoxy nucleoside
  modified_base 20: mod_base = OTHER; note = 2'-fluoro nucleoside
  modified_base 21: mod_base = OTHER; note = 2'-O-methoxy nucleoside with phosphorothioate bond
  modified_base 22: mod_base = OTHER; note = 2'-fluoro nucleoside with phosphorothioate bond
  modified_base 23: mod_base = OTHER; note = 2'-O-methoxy nucleoside
ttaataaaaatgctacaaaaccc

SEQ ID NO: 186 - RNA, 23 nt, synthetic construct
  source 1..23: mol_type = other RNA
  modified_base 1: mod_base = OTHER; note = 2'-O-methoxy nucleoside with phosphorothioate bond
  modified_base 2: mod_base = OTHER; note = 2'-fluoro nucleoside with phosphorothioate bond
  modified_base 3: mod_base = OTHER; note = 2'-O-methoxy nucleoside
  modified_base 4: mod_base = OTHER; note = 2'-fluoro nucleoside
  modified_base 5: mod_base = OTHER; note = 2'-O-methoxy nucleoside
  modified_base 6: mod_base = OTHER; note = 2'-fluoro nucleoside
  modified_base 7: mod_base = OTHER; note = 2'-O-methoxy nucleoside
  modified_base 8: mod_base = OTHER; note = 2'-fluoro nucleoside
  modified_base 9: mod_base = OTHER; note = 2'-O-methoxy nucleoside
  modified_base 10: mod_base = OTHER; note = 2'-fluoro nucleoside
  modified_base 11: mod_base = OTHER; note = 2'-O-methoxy nucleoside
  modified_base 12: mod_base = OTHER; note = 2'-fluoro nucleoside
  modified_base 13: mod_base = OTHER; note = 2'-O-methoxy nucleoside
  modified_base 14: mod_base = OTHER; note = 2'-fluoro nucleoside
  modified_base 15: mod_base = OTHER; note = 2'-O-methoxy nucleoside
  modified_base 16: mod_base = OTHER; note = 2'-fluoro nucleoside
  modified_base 17: mod_base = OTHER; note = 2'-O-methoxy nucleoside
  modified_base 18: mod_base = OTHER; note = 2'-fluoro nucleoside
  modified_base 19: mod_base = OTHER; note = 2'-O-methoxy nucleoside
  modified_base 20: mod_base = OTHER; note = 2'-fluoro nucleoside
  modified_base 21: mod_base = OTHER; note = 2'-O-methoxy nucleoside with phosphorothioate bond
  modified_base 22: mod_base = OTHER; note = 2'-fluoro nucleoside with phosphorothioate bond
  modified_base 23: mod_base = OTHER; note = 2'-O-methoxy nucleoside
aagacatgcaggatcttggtgag

SEQ ID NO: 187 - RNA, 23 nt, synthetic construct
  source 1..23: mol_type = other RNA
  modified_base 1: mod_base = OTHER; note = 2'-O-methoxy nucleoside with phosphorothioate bond
  modified_base 2: mod_base = OTHER; note = 2'-fluoro nucleoside with phosphorothioate bond
  modified_base 3: mod_base = OTHER; note = 2'-O-methoxy nucleoside
  modified_base 4: mod_base = OTHER; note = 2'-fluoro nucleoside
  modified_base 5: mod_base = OTHER; note = 2'-O-methoxy nucleoside
  modified_base 6: mod_base = OTHER; note = 2'-fluoro nucleoside
  modified_base 7: mod_base = OTHER; note = 2'-O-methoxy nucleoside
  modified_base 8: mod_base = OTHER; note = 2'-fluoro nucleoside
  modified_base 9: mod_base = OTHER; note = 2'-O-methoxy nucleoside
  modified_base 10: mod_base = OTHER; note = 2'-fluoro nucleoside
  modified_base 11: mod_base = OTHER; note = 2'-O-methoxy nucleoside
  modified_base 12: mod_base = OTHER; note = 2'-fluoro nucleoside
  modified_base 13: mod_base = OTHER; note = 2'-O-methoxy nucleoside
  modified_base 14: mod_base = OTHER; note = 2'-fluoro nucleoside
  modified_base 15: mod_base = OTHER; note = 2'-O-methoxy nucleoside
  modified_base 16: mod_base = OTHER; note = 2'-fluoro nucleoside
  modified_base 17: mod_base = OTHER; note = 2'-O-methoxy nucleoside
  modified_base 18: mod_base = OTHER; note = 2'-fluoro nucleoside
  modified_base 19: mod_base = OTHER; note = 2'-O-methoxy nucleoside
  modified_base 20: mod_base = OTHER; note = 2'-fluoro nucleoside
  modified_base 21: mod_base = OTHER; note = 2'-O-methoxy nucleoside with phosphorothioate bond
  modified_base 22: mod_base = OTHER; note = 2'-fluoro nucleoside with phosphorothioate bond
  modified_base 23: mod_base = OTHER; note = 2'-O-methoxy nucleoside
aataaactccaggcctatgaggg

SEQ ID NO: 188 - RNA, 23 nt, synthetic construct
  source 1..23: mol_type = other RNA
  modified_base 1: mod_base = OTHER; note = 2'-O-methoxy nucleoside with phosphorothioate bond
  modified_base 2: mod_base = OTHER; note = 2'-fluoro nucleoside with phosphorothioate bond
  modified_base 3: mod_base = OTHER; note = 2'-O-methoxy nucleoside
  modified_base 4: mod_base = OTHER; note = 2'-fluoro nucleoside
  modified_base 5: mod_base = OTHER; note = 2'-O-methoxy nucleoside
  modified_base 6: mod_base = OTHER; note = 2'-fluoro nucleoside
  modified_base 7: mod_base = OTHER; note = 2'-O-methoxy nucleoside
  modified_base 8: mod_base = OTHER; note = 2'-fluoro nucleoside
  modified_base 9: mod_base = OTHER; note = 2'-O-methoxy nucleoside
  modified_base 10: mod_base = OTHER; note = 2'-fluoro nucleoside
  modified_base 11: mod_base = OTHER; note = 2'-O-methoxy nucleoside
  modified_base 12: mod_base = OTHER; note = 2'-fluoro nucleoside
  modified_base 13: mod_base = OTHER; note = 2'-O-methoxy nucleoside
  modified_base 14: mod_base = OTHER; note = 2'-fluoro nucleoside
  modified_base 15: mod_base = OTHER; note = 2'-O-methoxy nucleoside
  modified_base 16: mod_base = OTHER; note = 2'-fluoro nucleoside
  modified_base 17: mod_base = OTHER; note = 2'-O-methoxy nucleoside
  modified_base 18: mod_base = OTHER; note = 2'-fluoro nucleoside
  modified_base 19: mod_base = OTHER; note = 2'-O-methoxy nucleoside
  modified_base 20: mod_base = OTHER; note = 2'-fluoro nucleoside
  modified_base 21: mod_base = OTHER; note = 2'-O-methoxy nucleoside with phosphorothioate bond
  modified_base 22: mod_base = OTHER; note = 2'-fluoro nucleoside with phosphorothioate bond
  modified_base 23: mod_base = OTHER; note = 2'-O-methoxy nucleoside
tttccgaataaactccaggccta

SEQ ID NO: 189 - RNA, 23 nt, synthetic construct
  source 1..23: mol_type = other RNA
  modified_base 1: mod_base = OTHER; note = 2'-O-methoxy nucleoside with phosphorothioate bond
  modified_base 2: mod_base = OTHER; note = 2'-fluoro nucleoside with phosphorothioate bond
  modified_base 3: mod_base = OTHER; note = 2'-O-methoxy nucleoside
  modified_base 4: mod_base = OTHER; note = 2'-fluoro nucleoside
  modified_base 5: mod_base = OTHER; note = 2'-O-methoxy nucleoside
  modified_base 6: mod_base = OTHER; note = 2'-fluoro nucleoside
  modified_base 7: mod_base = OTHER; note = 2'-O-methoxy nucleoside
  modified_base 8: mod_base = OTHER; note = 2'-fluoro nucleoside
  modified_base 9: mod_base = OTHER; note = 2'-O-methoxy nucleoside
  modified_base 10: mod_base = OTHER; note = 2'-fluoro nucleoside
  modified_base 11: mod_base = OTHER; note = 2'-O-methoxy nucleoside
  modified_base 12: mod_base = OTHER; note = 2'-fluoro nucleoside
  modified_base 13: mod_base = OTHER; note = 2'-O-methoxy nucleoside
  modified_base 14: mod_base = OTHER; note = 2'-fluoro nucleoside
  modified_base 15: mod_base = OTHER; note = 2'-O-methoxy nucleoside
  modified_base 16: mod_base = OTHER; note = 2'-fluoro nucleoside
  modified_base 17: mod_base = OTHER; note = 2'-O-methoxy nucleoside
  modified_base 18: mod_base = OTHER; note = 2'-fluoro nucleoside
  modified_base 19: mod_base = OTHER; note = 2'-O-methoxy nucleoside
  modified_base 20: mod_base = OTHER; note = 2'-fluoro nucleoside
  modified_base 21: mod_base = OTHER; note = 2'-O-methoxy nucleoside with phosphorothioate bond
  modified_base 22: mod_base = OTHER; note = 2'-fluoro nucleoside with phosphorothioate bond
  modified_base 23: mod_base = OTHER; note = 2'-O-methoxy nucleoside
tgtgacacaaagcaggtgctgca

SEQ ID NO: 190 - RNA, 23 nt, synthetic construct
  source 1..23: mol_type = other RNA
  modified_base 1: mod_base = OTHER; note = 2'-O-methoxy nucleoside with phosphorothioate bond
  modified_base 2: mod_base = OTHER; note = 2'-fluoro nucleoside with phosphorothioate bond
  modified_base 3: mod_base = OTHER; note = 2'-O-methoxy nucleoside
  modified_base 4: mod_base = OTHER; note = 2'-fluoro nucleoside
  modified_base 5: mod_base = OTHER; note = 2'-O-methoxy nucleoside
  modified_base 6: mod_base = OTHER; note = 2'-fluoro nucleoside
  modified_base 7: mod_base = OTHER; note = 2'-O-methoxy nucleoside
  modified_base 8: mod_base = OTHER; note = 2'-fluoro nucleoside
  modified_base 9: mod_base = OTHER; note = 2'-O-methoxy nucleoside
  modified_base 10: mod_base = OTHER; note = 2'-fluoro nucleoside
  modified_base 11: mod_base = OTHER; note = 2'-O-methoxy nucleoside
  modified_base 12: mod_base = OTHER; note = 2'-fluoro nucleoside
  modified_base 13: mod_base = OTHER; note = 2'-O-methoxy nucleoside
  modified_base 14: mod_base = OTHER; note = 2'-fluoro nucleoside
  modified_base 15: mod_base = OTHER; note = 2'-O-methoxy nucleoside
  modified_base 16: mod_base = OTHER; note = 2'-fluoro nucleoside
  modified_base 17: mod_base = OTHER; note = 2'-O-methoxy nucleoside
  modified_base 18: mod_base = OTHER; note = 2'-fluoro nucleoside
  modified_base 19: mod_base = OTHER; note = 2'-O-methoxy nucleoside
  modified_base 20: mod_base = OTHER; note = 2'-fluoro nucleoside
  modified_base 21: mod_base = OTHER; note = 2'-O-methoxy nucleoside with phosphorothioate bond
  modified_base 22: mod_base = OTHER; note = 2'-fluoro nucleoside with phosphorothioate bond
  modified_base 23: mod_base = OTHER; note = 2'-O-methoxy nucleoside
cttgactttgcattccagacctg

SEQ ID NO: 191 - RNA, 23 nt, synthetic construct
  source 1..23: mol_type = other RNA
  modified_base 1: mod_base = OTHER; note = 2'-O-methoxy nucleoside with phosphorothioate bond
  modified_base 2: mod_base = OTHER; note = 2'-fluoro nucleoside with phosphorothioate bond
  modified_base 3: mod_base = OTHER; note = 2'-O-methoxy nucleoside
  modified_base 4: mod_base = OTHER; note = 2'-fluoro nucleoside
  modified_base 5: mod_base = OTHER; note = 2'-O-methoxy nucleoside
  modified_base 6: mod_base = OTHER; note = 2'-fluoro nucleoside
  modified_base 7: mod_base = OTHER; note = 2'-O-methoxy nucleoside
  modified_base 8: mod_base = OTHER; note = 2'-fluoro nucleoside
  modified_base 9: mod_base = OTHER; note = 2'-O-methoxy nucleoside
  modified_base 10: mod_base = OTHER; note = 2'-fluoro nucleoside
  modified_base 11: mod_base = OTHER; note = 2'-O-methoxy nucleoside
  modified_base 12: mod_base = OTHER; note = 2'-fluoro nucleoside
  modified_base 13: mod_base = OTHER; note = 2'-O-methoxy nucleoside
  modified_base 14: mod_base = OTHER; note = 2'-fluoro nucleoside
  modified_base 15: mod_base = OTHER; note = 2'-O-methoxy nucleoside
  modified_base 16: mod_base = OTHER; note = 2'-fluoro nucleoside
  modified_base 17: mod_base = OTHER; note = 2'-O-methoxy nucleoside
  modified_base 18: mod_base = OTHER; note = 2'-fluoro nucleoside
  modified_base 19: mod_base = OTHER; note = 2'-O-methoxy nucleoside
  modified_base 20: mod_base = OTHER; note = 2'-fluoro nucleoside
  modified_base 21: mod_base = OTHER; note = 2'-O-methoxy nucleoside with phosphorothioate bond
  modified_base 22: mod_base = OTHER; note = 2'-fluoro nucleoside with phosphorothioate bond
  modified_base 23: mod_base = OTHER; note = 2'-O-methoxy nucleoside
atgccttagaagcatctccgcca

SEQ ID NO: 192 - RNA, 23 nt, synthetic construct
  source 1..23: mol_type = other RNA
  modified_base 1: mod_base = OTHER; note = 2'-O-methoxy nucleoside with phosphorothioate bond
  modified_base 2: mod_base = OTHER; note = 2'-fluoro nucleoside with phosphorothioate bond
  modified_base 3: mod_base = OTHER; note = 2'-O-methoxy nucleoside
  modified_base 4: mod_base = OTHER; note = 2'-fluoro nucleoside
  modified_base 5: mod_base = OTHER; note = 2'-O-methoxy nucleoside
  modified_base 6: mod_base = OTHER; note = 2'-fluoro nucleoside
  modified_base 7: mod_base = OTHER; note = 2'-O-methoxy nucleoside
  modified_base 8: mod_base = OTHER; note = 2'-fluoro nucleoside
  modified_base 9: mod_base = OTHER; note = 2'-O-methoxy nucleoside
  modified_base 10: mod_base = OTHER; note = 2'-fluoro nucleoside
  modified_base 11: mod_base = OTHER; note = 2'-O-methoxy nucleoside
  modified_base 12: mod_base = OTHER; note = 2'-fluoro nucleoside
  modified_base 13: mod_base = OTHER; note = 2'-O-methoxy nucleoside
  modified_base 14: mod_base = OTHER; note = 2'-fluoro nucleoside
  modified_base 15: mod_base = OTHER; note = 2'-O-methoxy nucleoside
  modified_base 16: mod_base = OTHER; note = 2'-fluoro nucleoside
  modified_base 17: mod_base = OTHER; note = 2'-O-methoxy nucleoside
  modified_base 18: mod_base = OTHER; note = 2'-fluoro nucleoside
  modified_base 19: mod_base = OTHER; note = 2'-O-methoxy nucleoside
  modified_base 20: mod_base = OTHER; note = 2'-fluoro nucleoside
  modified_base 21: mod_base = OTHER; note = 2'-O-methoxy nucleoside with phosphorothioate bond
  modified_base 22: mod_base = OTHER; note = 2'-fluoro nucleoside with phosphorothioate bond
  modified_base 23: mod_base = OTHER; note = 2'-O-methoxy nucleoside
aataaaaatgctacaaaacccag

SEQ ID NO: 193 - RNA, 21 nt, synthetic construct
  source 1..21: mol_type = other RNA
  modified_base 1: mod_base = OTHER; note = 2'-fluoro nucleoside with phosphorothioate bond
  modified_base 2: mod_base = OTHER; note = 2'-O-methoxy nucleoside with phosphorothioate bond
  modified_base 3: mod_base = OTHER; note = 2'-fluoro nucleoside
  modified_base 4: mod_base = OTHER; note = 2'-O-methoxy nucleoside
  modified_base 5: mod_base = OTHER; note = 2'-fluoro nucleoside
  modified_base 6: mod_base = OTHER; note = 2'-O-methoxy nucleoside
  modified_base 7: mod_base = OTHER; note = 2'-fluoro nucleoside
  modified_base 8: mod_base = OTHER; note = 2'-O-methoxy nucleoside
  modified_base 9: mod_base = OTHER; note = 2'-fluoro nucleoside
  modified_base 10: mod_base = OTHER; note = 2'-O-methoxy nucleoside
  modified_base 11: mod_base = OTHER; note = 2'-fluoro nucleoside
  modified_base 12: mod_base = OTHER; note = 2'-O-methoxy nucleoside
  modified_base 13: mod_base = OTHER; note = 2'-fluoro nucleoside
  modified_base 14: mod_base = OTHER; note = 2'-O-methoxy nucleoside
  modified_base 15: mod_base = OTHER; note = 2'-fluoro nucleoside
  modified_base 16: mod_base = OTHER; note = 2'-O-methoxy nucleoside
  modified_base 17: mod_base = OTHER; note = 2'-fluoro nucleoside
  modified_base 18: mod_base = OTHER; note = 2'-O-methoxy nucleoside
  modified_base 19: mod_base = OTHER; note = 2'-fluoro nucleoside
  modified_base 20: mod_base = OTHER; note = 2'-O-methoxy nucleoside
  modified_base 21: mod_base = OTHER; note = 2'-fluoro nucleoside
gggatacctcaccaagatcct

SEQ ID NO: 194 - RNA, 21 nt, synthetic construct
  source 1..21: mol_type = other RNA
  modified_base 1: mod_base = OTHER; note = 2'-fluoro nucleoside with phosphorothioate bond
  modified_base 2: mod_base = OTHER; note = 2'-O-methoxy nucleoside with phosphorothioate bond
  modified_base 3: mod_base = OTHER; note = 2'-fluoro nucleoside
  modified_base 4: mod_base = OTHER; note = 2'-O-methoxy nucleoside
  modified_base 5: mod_base = OTHER; note = 2'-fluoro nucleoside
  modified_base 6: mod_base = OTHER; note = 2'-O-methoxy nucleoside
  modified_base 7: mod_base = OTHER; note = 2'-fluoro nucleoside
  modified_base 8: mod_base = OTHER; note = 2'-O-methoxy nucleoside
  modified_base 9: mod_base = OTHER; note = 2'-fluoro nucleoside
  modified_base 10: mod_base = OTHER; note = 2'-O-methoxy nucleoside
  modified_base 11: mod_base = OTHER; note = 2'-fluoro nucleoside
  modified_base 12: mod_base = OTHER; note = 2'-O-methoxy nucleoside
  modified_base 13: mod_base = OTHER; note = 2'-fluoro nucleoside
  modified_base 14: mod_base = OTHER; note = 2'-O-methoxy nucleoside
  modified_base 15: mod_base = OTHER; note = 2'-fluoro nucleoside
  modified_base 16: mod_base = OTHER; note = 2'-O-methoxy nucleoside
  modified_base 17: mod_base = OTHER; note = 2'-fluoro nucleoside
  modified_base 18: mod_base = OTHER; note = 2'-O-methoxy nucleoside
  modified_base 19: mod_base = OTHER; note = 2'-fluoro nucleoside
  modified_base 20: mod_base = OTHER; note = 2'-O-methoxy nucleoside
  modified_base 21: mod_base = OTHER; note = 2'-fluoro nucleoside
atacctcaccaagatcctgca

SEQ ID NO: 195 - RNA, 21 nt, synthetic construct
  source 1..21: mol_type = other RNA
  modified_base 1: mod_base = OTHER; note = 2'-fluoro nucleoside with phosphorothioate bond
  modified_base 2: mod_base = OTHER; note = 2'-O-methoxy nucleoside with phosphorothioate bond
  modified_base 3: mod_base = OTHER; note = 2'-fluoro nucleoside
  modified_base 4: mod_base = OTHER; note = 2'-O-methoxy nucleoside
  modified_base 5: mod_base = OTHER; note = 2'-fluoro nucleoside
  modified_base 6: mod_base = OTHER; note = 2'-O-methoxy nucleoside
  modified_base 7: mod_base = OTHER; note = 2'-fluoro nucleoside
  modified_base 8: mod_base = OTHER; note = 2'-O-methoxy nucleoside
  modified_base 9: mod_base = OTHER; note = 2'-fluoro nucleoside
  modified_base 10: mod_base = OTHER; note = 2'-O-methoxy nucleoside
  modified_base 11: mod_base = OTHER; note = 2'-fluoro nucleoside
  modified_base 12: mod_base = OTHER; note = 2'-O-methoxy nucleoside
  modified_base 13: mod_base = OTHER; note = 2'-fluoro nucleoside
  modified_base 14: mod_base = OTHER; note = 2'-O-methoxy nucleoside
  modified_base 15: mod_base = OTHER; note = 2'-fluoro nucleoside
  modified_base 16: mod_base = OTHER; note = 2'-O-methoxy nucleoside
  modified_base 17: mod_base = OTHER; note = 2'-fluoro nucleoside
  modified_base 18: mod_base = OTHER; note = 2'-O-methoxy nucleoside
  modified_base 19: mod_base = OTHER; note = 2'-fluoro nucleoside
  modified_base 20: mod_base = OTHER; note = 2'-O-methoxy nucleoside
  modified_base 21: mod_base = OTHER; note = 2'-fluoro nucleoside
caagatcctgcatgtcttcca

SEQ ID NO: 196 - RNA, 21 nt, synthetic construct
  source 1..21: mol_type = other RNA
  modified_base 1: mod_base = OTHER; note = 2'-fluoro nucleoside with phosphorothioate bond
  modified_base 2: mod_base = OTHER; note = 2'-O-methoxy nucleoside with phosphorothioate bond
  modified_base 3: mod_base = OTHER; note = 2'-fluoro nucleoside
  modified_base 4: mod_base = OTHER; note = 2'-O-methoxy nucleoside
  modified_base 5: mod_base = OTHER; note = 2'-fluoro nucleoside
  modified_base 6: mod_base = OTHER; note = 2'-O-methoxy nucleoside
  modified_base 7: mod_base = OTHER; note = 2'-fluoro nucleoside
  modified_base 8: mod_base = OTHER; note = 2'-O-methoxy nucleoside
  modified_base 9: mod_base = OTHER; note = 2'-fluoro nucleoside
  modified_base 10: mod_base = OTHER; note = 2'-O-methoxy nucleoside
  modified_base 11: mod_base = OTHER; note = 2'-fluoro nucleoside
  modified_base 12: mod_base = OTHER; note = 2'-O-methoxy nucleoside
  modified_base 13: mod_base = OTHER; note = 2'-fluoro nucleoside
  modified_base 14: mod_base = OTHER; note = 2'-O-methoxy nucleoside
  modified_base 15: mod_base = OTHER; note = 2'-fluoro nucleoside
  modified_base 16: mod_base = OTHER; note = 2'-O-methoxy nucleoside
  modified_base 17: mod_base = OTHER; note = 2'-fluoro nucleoside
  modified_base 18: mod_base = OTHER; note = 2'-O-methoxy nucleoside
  modified_base 19: mod_base = OTHER; note = 2'-fluoro nucleoside
  modified_base 20: mod_base = OTHER; note = 2'-O-methoxy nucleoside
  modified_base 21: mod_base = OTHER; note = 2'-fluoro nucleoside
ggcttcctggtgaagatgagt

SEQ ID NO: 197 - RNA, 21 nt, synthetic construct
  source 1..21: mol_type = other RNA
  modified_base 1: mod_base = OTHER; note = 2'-fluoro nucleoside with phosphorothioate bond
  modified_base 2: mod_base = OTHER; note = 2'-O-methoxy nucleoside with phosphorothioate bond
  modified_base 3: mod_base = OTHER; note = 2'-fluoro nucleoside
  modified_base 4: mod_base = OTHER; note = 2'-O-methoxy nucleoside
  modified_base 5: mod_base = OTHER; note = 2'-fluoro nucleoside
  modified_base 6: mod_base = OTHER; note = 2'-O-methoxy nucleoside
  modified_base 7: mod_base = OTHER; note = 2'-fluoro nucleoside
  modified_base 8: mod_base = OTHER; note = 2'-O-methoxy nucleoside
  modified_base 9: mod_base = OTHER; note = 2'-fluoro nucleoside
  modified_base 10: mod_base = OTHER; note = 2'-O-methoxy nucleoside
  modified_base 11: mod_base = OTHER; note = 2'-fluoro nucleoside
  modified_base 12: mod_base = OTHER; note = 2'-O-methoxy nucleoside
  modified_base 13: mod_base = OTHER; note = 2'-fluoro nucleoside
  modified_base 14: mod_base = OTHER; note = 2'-O-methoxy nucleoside
  modified_base 15: mod_base = OTHER; note = 2'-fluoro nucleoside
  modified_base 16: mod_base = OTHER; note = 2'-O-methoxy nucleoside
  modified_base 17: mod_base = OTHER; note = 2'-fluoro nucleoside
  modified_base 18: mod_base = OTHER; note = 2'-O-methoxy nucleoside
  modified_base 19: mod_base = OTHER; note = 2'-fluoro nucleoside
  modified_base 20: mod_base = OTHER; note = 2'-O-methoxy nucleoside
  modified_base 21: mod_base = OTHER; note = 2'-fluoro nucleoside
gctggagctggccttgaagtt

SEQ ID NO: 198 - RNA, 21 nt, synthetic construct
  source 1..21: mol_type = other RNA
  modified_base 1: mod_base = OTHER; note = 2'-fluoro nucleoside with phosphorothioate bond
  modified_base 2: mod_base = OTHER; note = 2'-O-methoxy nucleoside with phosphorothioate bond
  modified_base 3: mod_base = OTHER; note = 2'-fluoro nucleoside
  modified_base 4: mod_base = OTHER; note = 2'-O-methoxy nucleoside
  modified_base 5: mod_base = OTHER; note = 2'-fluoro nucleoside
  modified_base 6: mod_base = OTHER; note = 2'-O-methoxy nucleoside
  modified_base 7: mod_base = OTHER; note = 2'-fluoro nucleoside
  modified_base 8: mod_base = OTHER; note = 2'-O-methoxy nucleoside
  modified_base 9: mod_base = OTHER; note = 2'-fluoro nucleoside
  modified_base 10: mod_base = OTHER; note = 2'-O-methoxy nucleoside
  modified_base 11: mod_base = OTHER; note = 2'-fluoro nucleoside
  modified_base 12: mod_base = OTHER; note = 2'-O-methoxy nucleoside
  modified_base 13: mod_base = OTHER; note = 2'-fluoro nucleoside
  modified_base 14: mod_base = OTHER; note = 2'-O-methoxy nucleoside
  modified_base 15: mod_base = OTHER; note = 2'-fluoro nucleoside
  modified_base 16: mod_base = OTHER; note = 2'-O-methoxy nucleoside
  modified_base 17: mod_base = OTHER; note = 2'-fluoro nucleoside
  modified_base 18: mod_base = OTHER; note = 2'-O-methoxy nucleoside
  modified_base 19: mod_base = OTHER; note = 2'-fluoro nucleoside
  modified_base 20: mod_base = OTHER; note = 2'-O-methoxy nucleoside
  modified_base 21: mod_base = OTHER; note = 2'-fluoro nucleoside
cctggagtttattcggaaaag

SEQ ID NO: 199 - RNA, 21 nt, synthetic construct
  source 1..21: mol_type = other RNA
  modified_base 1: mod_base = OTHER; note = 2'-fluoro nucleoside with phosphorothioate bond
  modified_base 2: mod_base = OTHER; note = 2'-O-methoxy nucleoside with phosphorothioate bond
  modified_base 3: mod_base = OTHER; note = 2'-fluoro nucleoside
  modified_base 4: mod_base = OTHER; note = 2'-O-methoxy nucleoside
  modified_base 5: mod_base = OTHER; note = 2'-fluoro nucleoside
  modified_base 6: mod_base = OTHER; note = 2'-O-methoxy nucleoside
  modified_base 7: mod_base = OTHER; note = 2'-fluoro nucleoside
  modified_base 8: mod_base = OTHER; note = 2'-O-methoxy nucleoside
  modified_base 9: mod_base = OTHER; note = 2'-fluoro nucleoside
  modified_base 10: mod_base = OTHER; note = 2'-O-methoxy nucleoside
  modified_base 11: mod_base = OTHER; note = 2'-fluoro nucleoside
  modified_base 12: mod_base = OTHER; note = 2'-O-methoxy nucleoside
  modified_base 13: mod_base = OTHER; note = 2'-fluoro nucleoside
  modified_base 14: mod_base = OTHER; note = 2'-O-methoxy nucleoside
  modified_base 15: mod_base = OTHER; note = 2'-fluoro nucleoside
  modified_base 16: mod_base = OTHER; note = 2'-O-methoxy nucleoside
  modified_base 17: mod_base = OTHER; note = 2'-fluoro nucleoside
  modified_base 18: mod_base = OTHER; note = 2'-O-methoxy nucleoside
  modified_base 19: mod_base = OTHER; note = 2'-fluoro nucleoside
  modified_base 20: mod_base = OTHER; note = 2'-O-methoxy nucleoside
  modified_base 21: mod_base = OTHER; note = 2'-fluoro nucleoside
gccagctggtccagcctgtgg

SEQ ID NO: 200 - RNA, 21 nt, synthetic construct
  source 1..21: mol_type = other RNA
  modified_base 1: mod_base = OTHER; note = 2'-fluoro nucleoside with phosphorothioate bond
  modified_base 2: mod_base = OTHER; note = 2'-O-methoxy nucleoside with phosphorothioate bond
  modified_base 3: mod_base = OTHER; note = 2'-fluoro nucleoside
  modified_base 4: mod_base = OTHER; note = 2'-O-methoxy nucleoside
  modified_base 5: mod_base = OTHER; note = 2'-fluoro nucleoside
  modified_base 6: mod_base = OTHER; note = 2'-O-methoxy nucleoside
  modified_base 7: mod_base = OTHER; note = 2'-fluoro nucleoside
  modified_base 8: mod_base = OTHER; note = 2'-O-methoxy nucleoside
  modified_base 9: mod_base = OTHER; note = 2'-fluoro nucleoside
  modified_base 10: mod_base = OTHER; note = 2'-O-methoxy nucleoside
  modified_base 11: mod_base = OTHER; note = 2'-fluoro nucleoside
  modified_base 12: mod_base = OTHER; note = 2'-O-methoxy nucleoside
  modified_base 13: mod_base = OTHER; note = 2'-fluoro nucleoside
  modified_base 14: mod_base = OTHER; note = 2'-O-methoxy nucleoside
  modified_base 15: mod_base = OTHER; note = 2'-fluoro nucleoside
  modified_base 16: mod_base = OTHER; note = 2'-O-methoxy nucleoside
  modified_base 17: mod_base = OTHER; note = 2'-fluoro nucleoside
  modified_base 18: mod_base = OTHER; note = 2'-O-methoxy nucleoside
  modified_base 19: mod_base = OTHER; note = 2'-fluoro nucleoside
  modified_base 20: mod_base = OTHER; note = 2'-O-methoxy nucleoside
  modified_base 21: mod_base = OTHER; note = 2'-fluoro nucleoside
actggtggtgctgctgcccct

SEQ ID NO: 201 - RNA, 21 nt, synthetic construct
  source 1..21: mol_type = other RNA
  modified_base 1: mod_base = OTHER; note = 2'-fluoro nucleoside with phosphorothioate bond
  modified_base 2: mod_base = OTHER; note = 2'-O-methoxy nucleoside with phosphorothioate bond
  modified_base 3: mod_base = OTHER; note = 2'-fluoro nucleoside
  modified_base 4: mod_base = OTHER; note = 2'-O-methoxy nucleoside
  modified_base 5: mod_base = OTHER; note = 2'-fluoro nucleoside
  modified_base 6: mod_base = OTHER; note = 2'-O-methoxy nucleoside
  modified_base 7: mod_base = OTHER; note = 2'-fluoro nucleoside
  modified_base 8: mod_base = OTHER; note = 2'-O-methoxy nucleoside
  modified_base 9: mod_base = OTHER; note = 2'-fluoro nucleoside
  modified_base 10: mod_base = OTHER; note = 2'-O-methoxy nucleoside
  modified_base 11: mod_base = OTHER; note = 2'-fluoro nucleoside
  modified_base 12: mod_base = OTHER; note = 2'-O-methoxy nucleoside
  modified_base 13: mod_base = OTHER; note = 2'-fluoro nucleoside
  modified_base 14: mod_base = OTHER; note = 2'-O-methoxy nucleoside
  modified_base 15: mod_base = OTHER; note = 2'-fluoro nucleoside
  modified_base 16: mod_base = OTHER; note = 2'-O-methoxy nucleoside
  modified_base 17: mod_base = OTHER; note = 2'-fluoro nucleoside
  modified_base 18: mod_base = OTHER; note = 2'-O-methoxy nucleoside
  modified_base 19: mod_base = OTHER; note = 2'-fluoro nucleoside
  modified_base 20: mod_base = OTHER; note = 2'-O-methoxy nucleoside
  modified_base 21: mod_base = OTHER; note = 2'-fluoro nucleoside
tgcccctggcgggtgggtaca

SEQ ID NO: 202 - RNA, 21 nt, synthetic construct
  source 1..21: mol_type = other RNA
  modified_base 1: mod_base = OTHER; note = 2'-fluoro nucleoside with phosphorothioate bond
  modified_base 2: mod_base = OTHER; note = 2'-O-methoxy nucleoside with phosphorothioate bond
  modified_base 3: mod_base = OTHER; note = 2'-fluoro nucleoside
  modified_base 4: mod_base = OTHER; note = 2'-O-methoxy nucleoside
  modified_base 5: mod_base = OTHER; note = 2'-fluoro nucleoside
  modified_base 6: mod_base = OTHER; note = 2'-O-methoxy nucleoside
  modified_base 7: mod_base = OTHER; note = 2'-fluoro nucleoside
  modified_base 8: mod_base = OTHER; note = 2'-O-methoxy nucleoside
  modified_base 9: mod_base = OTHER; note = 2'-fluoro nucleoside
  modified_base 10: mod_base = OTHER; note = 2'-O-methoxy nucleoside
  modified_base 11: mod_base = OTHER; note = 2'-fluoro nucleoside
  modified_base 12: mod_base = OTHER; note = 2'-O-methoxy nucleoside
  modified_base 13: mod_base = OTHER; note = 2'-fluoro nucleoside
  modified_base 14: mod_base = OTHER; note = 2'-O-methoxy nucleoside
  modified_base 15: mod_base = OTHER; note = 2'-fluoro nucleoside
  modified_base 16: mod_base = OTHER; note = 2'-O-methoxy nucleoside
  modified_base 17: mod_base = OTHER; note = 2'-fluoro nucleoside
  modified_base 18: mod_base = OTHER; note = 2'-O-methoxy nucleoside
  modified_base 19: mod_base = OTHER; note = 2'-fluoro nucleoside
  modified_base 20: mod_base = OTHER; note = 2'-O-methoxy nucleoside
  modified_base 21: mod_base = OTHER; note = 2'-fluoro nucleoside
tgggtacagccgcgtcctcaa

SEQ ID NO: 203 - RNA, 21 nt, synthetic construct
  source 1..21: mol_type = other RNA
  modified_base 1: mod_base = OTHER; note = 2'-fluoro nucleoside with phosphorothioate bond
  modified_base 2: mod_base = OTHER; note = 2'-O-methoxy nucleoside with phosphorothioate bond
  modified_base 3: mod_base = OTHER; note = 2'-fluoro nucleoside
  modified_base 4: mod_base = OTHER; note = 2'-O-methoxy nucleoside
  modified_base 5: mod_base = OTHER; note = 2'-fluoro nucleoside
  modified_base 6: mod_base = OTHER; note = 2'-O-methoxy nucleoside
  modified_base 7: mod_base = OTHER; note = 2'-fluoro nucleoside
  modified_base 8: mod_base = OTHER; note = 2'-O-methoxy nucleoside
  modified_base 9: mod_base = OTHER; note = 2'-fluoro nucleoside
  modified_base 10: mod_base = OTHER; note = 2'-O-methoxy nucleoside
  modified_base 11: mod_base = OTHER; note = 2'-fluoro nucleoside
  modified_base 12: mod_base = OTHER; note = 2'-O-methoxy nucleoside
  modified_base 13: mod_base = OTHER; note = 2'-fluoro nucleoside
  modified_base 14: mod_base = OTHER; note = 2'-O-methoxy nucleoside
  modified_base 15: mod_base = OTHER; note = 2'-fluoro nucleoside
  modified_base 16: mod_base = OTHER; note = 2'-O-methoxy nucleoside
  modified_base 17: mod_base = OTHER; note = 2'-fluoro nucleoside
  modified_base 18: mod_base = OTHER; note = 2'-O-methoxy nucleoside
  modified_base 19: mod_base = OTHER; note = 2'-fluoro nucleoside
  modified_base 20: mod_base = OTHER; note = 2'-O-methoxy nucleoside
  modified_base 21: mod_base = OTHER; note = 2'-fluoro nucleoside
cgtcctcaacgccgcctgcca

SEQ ID NO: 204 - RNA, 21 nt, synthetic construct
  source 1..21: mol_type = other RNA
  modified_base 1: mod_base = OTHER; note = 2'-fluoro nucleoside with phosphorothioate bond
  modified_base 2: mod_base = OTHER; note = 2'-O-methoxy nucleoside with phosphorothioate bond
  modified_base 3: mod_base = OTHER; note = 2'-fluoro nucleoside
  modified_base 4: mod_base = OTHER; note = 2'-O-methoxy nucleoside
  modified_base 5: mod_base = OTHER; note = 2'-fluoro nucleoside
  modified_base 6: mod_base = OTHER; note = 2'-O-methoxy nucleoside
  modified_base 7: mod_base = OTHER; note = 2'-fluoro nucleoside
  modified_base 8: mod_base = OTHER; note = 2'-O-methoxy nucleoside
  modified_base 9: mod_base = OTHER; note = 2'-fluoro nucleoside
  modified_base 10: mod_base = OTHER; note = 2'-O-methoxy nucleoside
  modified_base 11: mod_base = OTHER; note = 2'-fluoro nucleoside
  modified_base 12: mod_base = OTHER; note = 2'-O-methoxy nucleoside
  modified_base 13: mod_base = OTHER; note = 2'-fluoro nucleoside
  modified_base 14: mod_base = OTHER; note = 2'-O-methoxy nucleoside
  modified_base 15: mod_base = OTHER; note = 2'-fluoro nucleoside
  modified_base 16: mod_base = OTHER; note = 2'-O-methoxy nucleoside
  modified_base 17: mod_base = OTHER; note = 2'-fluoro nucleoside
  modified_base 18: mod_base = OTHER; note = 2'-O-methoxy nucleoside
  modified_base 19: mod_base = OTHER; note = 2'-fluoro nucleoside
  modified_base 20: mod_base = OTHER; note = 2'-O-methoxy nucleoside
  modified_base 21: mod_base = OTHER; note = 2'-fluoro nucleoside
ggtcgtgctggtcaccgctgc

SEQ ID NO: 205 - RNA, 21 nt, synthetic construct
  source 1..21: mol_type = other RNA
  modified_base 1: mod_base = OTHER; note = 2'-fluoro nucleoside with phosphorothioate bond
  modified_base 2: mod_base = OTHER; note = 2'-O-methoxy nucleoside with phosphorothioate bond
  modified_base 3: mod_base = OTHER; note = 2'-fluoro nucleoside
  modified_base 4: mod_base = OTHER; note = 2'-O-methoxy nucleoside
  modified_base 5: mod_base = OTHER; note = 2'-fluoro nucleoside
  modified_base 6: mod_base = OTHER; note = 2'-O-methoxy nucleoside
  modified_base 7: mod_base = OTHER; note = 2'-fluoro nucleoside
  modified_base 8: mod_base = OTHER; note = 2'-O-methoxy nucleoside
  modified_base 9: mod_base = OTHER; note = 2'-fluoro nucleoside
  modified_base 10: mod_base = OTHER; note = 2'-O-methoxy nucleoside
  modified_base 11: mod_base = OTHER; note = 2'-fluoro nucleoside
  modified_base 12: mod_base = OTHER; note = 2'-O-methoxy nucleoside
  modified_base 13: mod_base = OTHER; note = 2'-fluoro nucleoside
  modified_base 14: mod_base = OTHER; note = 2'-O-methoxy nucleoside
  modified_base 15: mod_base = OTHER; note = 2'-fluoro nucleoside
  modified_base 16: mod_base = OTHER; note = 2'-O-methoxy nucleoside
  modified_base 17: mod_base = OTHER; note = 2'-fluoro nucleoside
  modified_base 18: mod_base = OTHER; note = 2'-O-methoxy nucleoside
  modified_base 19: mod_base = OTHER; note = 2'-fluoro nucleoside
  modified_base 20: mod_base = OTHER; note = 2'-O-methoxy nucleoside
  modified_base 21: mod_base = OTHER; note = 2'-fluoro nucleoside
aggacatcattggtgcctcca

SEQ ID NO: 206 - RNA, 21 nt, synthetic construct
  source 1..21: mol_type = other RNA
  modified_base 1: mod_base = OTHER; note = 2'-fluoro nucleoside with phosphorothioate bond
  modified_base 2: mod_base = OTHER; note = 2'-O-methoxy nucleoside with phosphorothioate bond
  modified_base 3: mod_base = OTHER; note = 2'-fluoro nucleoside
  modified_base 4: mod_base = OTHER; note = 2'-O-methoxy nucleoside
  modified_base 5: mod_base = OTHER; note = 2'-fluoro nucleoside
  modified_base 6: mod_base = OTHER; note = 2'-O-methoxy nucleoside
  modified_base 7: mod_base = OTHER; note = 2'-fluoro nucleoside
  modified_base 8: mod_base = OTHER; note = 2'-O-methoxy nucleoside
  modified_base 9: mod_base = OTHER; note = 2'-fluoro nucleoside
  modified_base 10: mod_base = OTHER; note = 2'-O-methoxy nucleoside
  modified_base 11: mod_base = OTHER; note = 2'-fluoro nucleoside
  modified_base 12: mod_base = OTHER; note = 2'-O-methoxy nucleoside
  modified_base 13: mod_base = OTHER; note = 2'-fluoro nucleoside
  modified_base 14: mod_base = OTHER; note = 2'-O-methoxy nucleoside
  modified_base 15: mod_base = OTHER; note = 2'-fluoro nucleoside
  modified_base 16: mod_base = OTHER; note = 2'-O-methoxy nucleoside
  modified_base 17: mod_base = OTHER; note = 2'-fluoro nucleoside
  modified_base 18: mod_base = OTHER; note = 2'-O-methoxy nucleoside
  modified_base 19: mod_base = OTHER; note = 2'-fluoro nucleoside
  modified_base 20: mod_base = OTHER; note = 2'-O-methoxy nucleoside
  modified_base 21: mod_base = OTHER; note = 2'-fluoro nucleoside
tcattggtgcctccagcgact

SEQ ID NO: 207 - RNA, 21 nt, synthetic construct
  source 1..21: mol_type = other RNA
  modified_base 1: mod_base = OTHER; note = 2'-fluoro nucleoside with phosphorothioate bond
  modified_base 2: mod_base = OTHER; note = 2'-O-methoxy nucleoside with phosphorothioate bond
  modified_base 3: mod_base = OTHER; note = 2'-fluoro nucleoside
  modified_base 4: mod_base = OTHER; note = 2'-O-methoxy nucleoside
  modified_base 5: mod_base = OTHER; note = 2'-fluoro nucleoside
  modified_base 6: mod_base = OTHER; note = 2'-O-methoxy nucleoside
  modified_base 7: mod_base = OTHER; note = 2'-fluoro nucleoside
  modified_base 8: mod_base = OTHER; note = 2'-O-methoxy nucleoside
  modified_base 9: mod_base = OTHER; note = 2'-fluoro nucleoside
  modified_base 10: mod_base = OTHER; note = 2'-O-methoxy nucleoside
  modified_base 11: mod_base = OTHER; note = 2'-fluoro nucleoside
  modified_base 12: mod_base = OTHER; note = 2'-O-methoxy nucleoside
  modified_base 13: mod_base = OTHER; note = 2'-fluoro nucleoside
  modified_base 14: mod_base = OTHER; note = 2'-O-methoxy nucleoside
  modified_base 15: mod_base = OTHER; note = 2'-fluoro nucleoside
  modified_base 16: mod_base = OTHER; note = 2'-O-methoxy nucleoside
  modified_base 17: mod_base = OTHER; note = 2'-fluoro nucleoside
  modified_base 18: mod_base = OTHER; note = 2'-O-methoxy nucleoside
  modified_base 19: mod_base = OTHER; note = 2'-fluoro nucleoside
  modified_base 20: mod_base = OTHER; note = 2'-O-methoxy nucleoside
  modified_base 21: mod_base = OTHER; note = 2'-fluoro nucleoside
gtgcctccagcgactgcagca

SEQ ID NO: 208 - RNA, 21 nt, synthetic construct
  source 1..21: mol_type = other RNA
  modified_base 1: mod_base = OTHER; note = 2'-fluoro nucleoside with phosphorothioate bond
  modified_base 2: mod_base = OTHER; note = 2'-O-methoxy nucleoside with phosphorothioate bond
  modified_base 3: mod_base = OTHER; note = 2'-fluoro nucleoside
  modified_base 4: mod_base = OTHER; note = 2'-O-methoxy nucleoside
  modified_base 5: mod_base = OTHER; note = 2'-fluoro nucleoside
  modified_base 6: mod_base = OTHER; note = 2'-O-methoxy nucleoside
  modified_base 7: mod_base = OTHER; note = 2'-fluoro nucleoside
  modified_base 8: mod_base = OTHER; note = 2'-O-methoxy nucleoside
  modified_base 9: mod_base = OTHER; note = 2'-fluoro nucleoside
  modified_base 10: mod_base = OTHER; note = 2'-O-methoxy nucleoside
  modified_base 11: mod_base = OTHER; note = 2'-fluoro nucleoside
  modified_base 12: mod_base = OTHER; note = 2'-O-methoxy nucleoside
  modified_base 13: mod_base = OTHER; note = 2'-fluoro nucleoside
  modified_base 14: mod_base = OTHER; note = 2'-O-methoxy nucleoside
  modified_base 15: mod_base = OTHER; note = 2'-fluoro nucleoside
  modified_base 16: mod_base = OTHER; note = 2'-O-methoxy nucleoside
  modified_base 17: mod_base = OTHER; note = 2'-fluoro nucleoside
  modified_base 18: mod_base = OTHER; note = 2'-O-methoxy nucleoside
  modified_base 19: mod_base = OTHER; note = 2'-fluoro nucleoside
  modified_base 20: mod_base = OTHER; note = 2'-O-methoxy nucleoside
  modified_base 21: mod_base = OTHER; note = 2'-fluoro nucleoside
agcgactgcagcacctgcttt

SEQ ID NO: 209 - RNA, 21 nt, synthetic construct
  source 1..21: mol_type = other RNA
  modified_base 1: mod_base = OTHER; note = 2'-fluoro nucleoside with phosphorothioate bond
  modified_base 2: mod_base = OTHER; note = 2'-O-methoxy nucleoside with phosphorothioate bond
  modified_base 3: mod_base = OTHER; note = 2'-fluoro nucleoside
  modified_base 4: mod_base = OTHER; note = 2'-O-methoxy nucleoside
  modified_base 5: mod_base = OTHER; note = 2'-fluoro nucleoside
  modified_base 6: mod_base = OTHER; note = 2'-O-methoxy nucleoside
  modified_base 7: mod_base = OTHER; note = 2'-fluoro nucleoside
  modified_base 8: mod_base = OTHER; note = 2'-O-methoxy nucleoside
  modified_base 9: mod_base = OTHER; note = 2'-fluoro nucleoside
  modified_base 10: mod_base = OTHER; note = 2'-O-methoxy nucleoside
  modified_base 11: mod_base = OTHER; note = 2'-fluoro nucleoside
  modified_base 12: mod_base = OTHER; note = 2'-O-methoxy nucleoside
  modified_base 13: mod_base = OTHER; note = 2'-fluoro nucleoside
  modified_base 14: mod_base = OTHER; note = 2'-O-methoxy nucleoside
  modified_base 15: mod_base = OTHER; note = 2'-fluoro nucleoside
  modified_base 16: mod_base = OTHER; note = 2'-O-methoxy nucleoside
  modified_base 17: mod_base = OTHER; note = 2'-fluoro nucleoside
  modified_base 18: mod_base = OTHER; note = 2'-O-methoxy nucleoside
  modified_base 19: mod_base = OTHER; note = 2'-fluoro nucleoside
  modified_base 20: mod_base = OTHER; note = 2'-O-methoxy nucleoside
  modified_base 21: mod_base = OTHER; note = 2'-fluoro nucleoside
gcacctgctttgtgtcacaga

SEQ ID NO: 210 - RNA, 21 nt, synthetic construct
  source 1..21: mol_type = other RNA
  modified_base 1: mod_base = OTHER; note = 2'-fluoro nucleoside with phosphorothioate bond
  modified_base 2: mod_base = OTHER; note = 2'-O-methoxy nucleoside with phosphorothioate bond
  modified_base 3: mod_base = OTHER; note = 2'-fluoro nucleoside
  modified_base 4: mod_base = OTHER; note = 2'-O-methoxy nucleoside
  modified_base 5: mod_base = OTHER; note = 2'-fluoro nucleoside
  modified_base 6: mod_base = OTHER; note = 2'-O-methoxy nucleoside
  modified_base 7: mod_base = OTHER; note = 2'-fluoro nucleoside
  modified_base 8: mod_base = OTHER; note = 2'-O-methoxy nucleoside
  modified_base 9: mod_base = OTHER; note = 2'-fluoro nucleoside
  modified_base 10: mod_base = OTHER; note = 2'-O-methoxy nucleoside
  modified_base 11: mod_base = OTHER; note = 2'-fluoro nucleoside
  modified_base 12: mod_base = OTHER; note = 2'-O-methoxy nucleoside
  modified_base 13: mod_base = OTHER; note = 2'-fluoro nucleoside
  modified_base 14: mod_base = OTHER; note = 2'-O-methoxy nucleoside
  modified_base 15: mod_base = OTHER; note = 2'-fluoro nucleoside
  modified_base 16: mod_base = OTHER; note = 2'-O-methoxy nucleoside
  modified_base 17: mod_base = OTHER; note = 2'-fluoro nucleoside
  modified_base 18: mod_base = OTHER; note = 2'-O-methoxy nucleoside
  modified_base 19: mod_base = OTHER; note = 2'-fluoro nucleoside
  modified_base 20: mod_base = OTHER; note = 2'-O-methoxy nucleoside
  modified_base 21: mod_base = OTHER; note = 2'-fluoro nucleoside
ctttgtgtcacagagtgggac

SEQ ID NO: 211 - RNA, 21 nt, synthetic construct
  source 1..21: mol_type = other RNA
  modified_base 1: mod_base = OTHER; note = 2'-fluoro nucleoside with phosphorothioate bond
  modified_base 2: mod_base = OTHER; note = 2'-O-methoxy nucleoside with phosphorothioate bond
  modified_base 3: mod_base = OTHER; note = 2'-fluoro nucleoside
  modified_base 4: mod_base = OTHER; note = 2'-O-methoxy nucleoside
  modified_base 5: mod_base = OTHER; note = 2'-fluoro nucleoside
  modified_base 6: mod_base = OTHER; note = 2'-O-methoxy nucleoside
  modified_base 7: mod_base = OTHER; note = 2'-fluoro nucleoside
  modified_base 8: mod_base = OTHER; note = 2'-O-methoxy nucleoside
  modified_base 9: mod_base = OTHER; note = 2'-fluoro nucleoside
  modified_base 10: mod_base = OTHER; note = 2'-O-methoxy nucleoside
  modified_base 11: mod_base = OTHER; note = 2'-fluoro nucleoside
  modified_base 12: mod_base = OTHER; note = 2'-O-methoxy nucleoside
  modified_base 13: mod_base = OTHER; note = 2'-fluoro nucleoside
  modified_base 14: mod_base = OTHER; note = 2'-O-methoxy nucleoside
  modified_base 15: mod_base = OTHER; note = 2'-fluoro nucleoside
  modified_base 16: mod_base = OTHER; note = 2'-O-methoxy nucleoside
  modified_base 17: mod_base = OTHER; note = 2'-fluoro nucleoside
  modified_base 18: mod_base = OTHER; note = 2'-O-methoxy nucleoside
  modified_base 19: mod_base = OTHER; note = 2'-fluoro nucleoside
  modified_base 20: mod_base = OTHER; note = 2'-O-methoxy nucleoside
  modified_base 21: mod_base = OTHER; note = 2'-fluoro nucleoside
agtgggacatcacaggctgct

SEQ ID NO: 212 - RNA, 21 nt, synthetic construct
  source 1..21: mol_type = other RNA
  modified_base 1: mod_base = OTHER; note = 2'-fluoro nucleoside with phosphorothioate bond
  modified_base 2: mod_base = OTHER; note = 2'-O-methoxy nucleoside with phosphorothioate bond
  modified_base 3: mod_base = OTHER; note = 2'-fluoro nucleoside
  modified_base 4: mod_base = OTHER; note = 2'-O-methoxy nucleoside
  modified_base 5: mod_base = OTHER; note = 2'-fluoro nucleoside
  modified_base 6: mod_base = OTHER; note = 2'-O-methoxy nucleoside
  modified_base 7: mod_base = OTHER; note = 2'-fluoro nucleoside
  modified_base 8: mod_base = OTHER; note = 2'-O-methoxy nucleoside
  modified_base 9: mod_base = OTHER; note = 2'-fluoro nucleoside
  modified_base 10: mod_base = OTHER; note = 2'-O-methoxy nucleoside
  modified_base 11: mod_base = OTHER; note = 2'-fluoro nucleoside
  modified_base 12: mod_base = OTHER; note = 2'-O-methoxy nucleoside
  modified_base 13: mod_base = OTHER; note = 2'-fluoro nucleoside
  modified_base 14: mod_base = OTHER; note = 2'-O-methoxy nucleoside
  modified_base 15: mod_base = OTHER; note = 2'-fluoro nucleoside
  modified_base 16: mod_base = OTHER; note = 2'-O-methoxy nucleoside
  modified_base 17: mod_base = OTHER; note = 2'-fluoro nucleoside
  modified_base 18: mod_base = OTHER; note = 2'-O-methoxy nucleoside
  modified_base 19: mod_base = OTHER; note = 2'-fluoro nucleoside
  modified_base 20: mod_base = OTHER; note = 2'-O-methoxy nucleoside
  modified_base 21: mod_base = OTHER; note = 2'-fluoro nucleoside
atcacaggctgctgcccacgt

SEQ ID NO: 213 - RNA, 21 nt, synthetic construct
  source 1..21: mol_type = other RNA
  modified_base 1: mod_base = OTHER; note = 2'-fluoro nucleoside with phosphorothioate bond
  modified_base 2: mod_base = OTHER; note = 2'-O-methoxy nucleoside with phosphorothioate bond
  modified_base 3: mod_base = OTHER; note = 2'-fluoro nucleoside
  modified_base 4: mod_base = OTHER; note = 2'-O-methoxy nucleoside
  modified_base 5: mod_base = OTHER; note = 2'-fluoro nucleoside
  modified_base 6: mod_base = OTHER; note = 2'-O-methoxy nucleoside
  modified_base 7: mod_base = OTHER; note = 2'-fluoro nucleoside
  modified_base 8: mod_base = OTHER; note = 2'-O-methoxy nucleoside
  modified_base 9: mod_base = OTHER; note = 2'-fluoro nucleoside
  modified_base 10: mod_base = OTHER; note = 2'-O-methoxy nucleoside
  modified_base 11: mod_base = OTHER; note = 2'-fluoro nucleoside
  modified_base 12: mod_base = OTHER; note = 2'-O-methoxy nucleoside
  modified_base 13: mod_base = OTHER; note = 2'-fluoro nucleoside
  modified_base 14: mod_base = OTHER; note = 2'-O-methoxy nucleoside
  modified_base 15: mod_base = OTHER; note = 2'-fluoro nucleoside
  modified_base 16: mod_base = OTHER; note = 2'-O-methoxy nucleoside
  modified_base 17: mod_base = OTHER; note = 2'-fluoro nucleoside
  modified_base 18: mod_base = OTHER; note = 2'-O-methoxy nucleoside
  modified_base 19: mod_base = OTHER; note = 2'-fluoro nucleoside
  modified_base 20: mod_base = OTHER; note = 2'-O-methoxy nucleoside
  modified_base 21: mod_base = OTHER; note = 2'-fluoro nucleoside
tgtctgccgagccggagctca

SEQ ID NO: 214 - RNA, 21 nt, synthetic construct
  source 1..21: mol_type = other RNA
  modified_base 1: mod_base = OTHER; note = 2'-fluoro nucleoside with phosphorothioate bond
  modified_base 2: mod_base = OTHER; note = 2'-O-methoxy nucleoside with phosphorothioate bond
  modified_base 3: mod_base = OTHER; note = 2'-fluoro nucleoside
  modified_base 4: mod_base = OTHER; note = 2'-O-methoxy nucleoside
  modified_base 5: mod_base = OTHER; note = 2'-fluoro nucleoside
  modified_base 6: mod_base = OTHER; note = 2'-O-methoxy nucleoside
  modified_base 7: mod_base = OTHER; note = 2'-fluoro nucleoside
  modified_base 8: mod_base = OTHER; note = 2'-O-methoxy nucleoside
  modified_base 9: mod_base = OTHER; note = 2'-fluoro nucleoside
  modified_base 10: mod_base = OTHER; note = 2'-O-methoxy nucleoside
  modified_base 11: mod_base = OTHER; note = 2'-fluoro nucleoside
  modified_base 12: mod_base = OTHER; note = 2'-O-methoxy nucleoside
  modified_base 13: mod_base = OTHER; note = 2'-fluoro nucleoside
  modified_base 14: mod_base = OTHER; note = 2'-O-methoxy nucleoside
  modified_base 15: mod_base = OTHER; note = 2'-fluoro nucleoside
  modified_base 16: mod_base = OTHER; note = 2'-O-methoxy nucleoside
  modified_base 17: mod_base = OTHER; note = 2'-fluoro nucleoside
  modified_base 18: mod_base = OTHER; note = 2'-O-methoxy nucleoside
  modified_base 19: mod_base = OTHER; note = 2'-fluoro nucleoside
  modified_base 20: mod_base = OTHER; note = 2'-O-methoxy nucleoside
  modified_base 21: mod_base = OTHER; note = 2'-fluoro nucleoside
ggccgagttgaggcagagact

SEQ ID NO: 215 - RNA, 21 nt, synthetic construct
  source 1..21: mol_type = other RNA
  modified_base 1: mod_base = OTHER; note = 2'-fluoro nucleoside with phosphorothioate bond
  modified_base 2: mod_base = OTHER; note = 2'-O-methoxy nucleoside with phosphorothioate bond
  modified_base 3: mod_base = OTHER; note = 2'-fluoro nucleoside
  modified_base 4: mod_base = OTHER; note = 2'-O-methoxy nucleoside
  modified_base 5: mod_base = OTHER; note = 2'-fluoro nucleoside
  modified_base 6: mod_base = OTHER; note = 2'-O-methoxy nucleoside
  modified_base 7: mod_base = OTHER; note = 2'-fluoro nucleoside
  modified_base 8: mod_base = OTHER; note = 2'-O-methoxy nucleoside
  modified_base 9: mod_base = OTHER; note = 2'-fluoro nucleoside
  modified_base 10: mod_base = OTHER; note = 2'-O-methoxy nucleoside
  modified_base 11: mod_base = OTHER; note = 2'-fluoro nucleoside
  modified_base 12: mod_base = OTHER; note = 2'-O-methoxy nucleoside
  modified_base 13: mod_base = OTHER; note = 2'-fluoro nucleoside
  modified_base 14: mod_base = OTHER; note = 2'-O-methoxy nucleoside
  modified_base 15: mod_base = OTHER; note = 2'-fluoro nucleoside
  modified_base 16: mod_base = OTHER; note = 2'-O-methoxy nucleoside
  modified_base 17: mod_base = OTHER; note = 2'-fluoro nucleoside
  modified_base 18: mod_base = OTHER; note = 2'-O-methoxy nucleoside
  modified_base 19: mod_base = OTHER; note = 2'-fluoro nucleoside
  modified_base 20: mod_base = OTHER; note = 2'-O-methoxy nucleoside
  modified_base 21: mod_base = OTHER; note = 2'-fluoro nucleoside
catccacgcttcctgctgcca

SEQ ID NO: 216 - RNA, 21 nt, synthetic construct
  source 1..21: mol_type = other RNA
  modified_base 1: mod_base = OTHER; note = 2'-fluoro nucleoside with phosphorothioate bond
  modified_base 2: mod_base = OTHER; note = 2'-O-methoxy nucleoside with phosphorothioate bond
  modified_base 3: mod_base = OTHER; note = 2'-fluoro nucleoside
  modified_base 4: mod_base = OTHER; note = 2'-O-methoxy nucleoside
  modified_base 5: mod_base = OTHER; note = 2'-fluoro nucleoside
  modified_base 6: mod_base = OTHER; note = 2'-O-methoxy nucleoside
  modified_base 7: mod_base = OTHER; note = 2'-fluoro nucleoside
  modified_base 8: mod_base = OTHER; note = 2'-O-methoxy nucleoside
  modified_base 9: mod_base = OTHER; note = 2'-fluoro nucleoside
  modified_base 10: mod_base = OTHER; note = 2'-O-methoxy nucleoside
  modified_base 11: mod_base = OTHER; note = 2'-fluoro nucleoside
  modified_base 12: mod_base = OTHER; note = 2'-O-methoxy nucleoside
  modified_base 13: mod_base = OTHER; note = 2'-fluoro nucleoside
  modified_base 14: mod_base = OTHER; note = 2'-O-methoxy nucleoside
  modified_base 15: mod_base = OTHER; note = 2'-fluoro nucleoside
  modified_base 16: mod_base = OTHER; note = 2'-O-methoxy nucleoside
  modified_base 17: mod_base = OTHER; note = 2'-fluoro nucleoside
  modified_base 18: mod_base = OTHER; note = 2'-O-methoxy nucleoside
  modified_base 19: mod_base = OTHER; note = 2'-fluoro nucleoside
  modified_base 20: mod_base = OTHER; note = 2'-O-methoxy nucleoside
  modified_base 21: mod_base = OTHER; note = 2'-fluoro nucleoside
cccaggtctggaatgcaaagt

SEQ ID NO: 217 - RNA, 21 nt, synthetic construct
  source 1..21: mol_type = other RNA
  modified_base 1: mod_base = OTHER; note = 2'-fluoro nucleoside with phosphorothioate bond
  modified_base 2: mod_base = OTHER; note = 2'-O-methoxy nucleoside with phosphorothioate bond
  modified_base 3: mod_base = OTHER; note = 2'-fluoro nucleoside
  modified_base 4: mod_base = OTHER; note = 2'-O-methoxy nucleoside
  modified_base 5: mod_base = OTHER; note = 2'-fluoro nucleoside
  modified_base 6: mod_base = OTHER; note = 2'-O-methoxy nucleoside
  modified_base 7: mod_base = OTHER; note = 2'-fluoro nucleoside
  modified_base 8: mod_base = OTHER; note = 2'-O-methoxy nucleoside
  modified_base 9: mod_base = OTHER; note = 2'-fluoro nucleoside
  modified_base 10: mod_base = OTHER; note = 2'-O-methoxy nucleoside
  modified_base 11: mod_base = OTHER; note = 2'-fluoro nucleoside
  modified_base 12: mod_base = OTHER; note = 2'-O-methoxy nucleoside
  modified_base 13: mod_base = OTHER; note = 2'-fluoro nucleoside
  modified_base 14: mod_base = OTHER; note = 2'-O-methoxy nucleoside
  modified_base 15: mod_base = OTHER; note = 2'-fluoro nucleoside
  modified_base 16: mod_base = OTHER; note = 2'-O-methoxy nucleoside
  modified_base 17: mod_base = OTHER; note = 2'-fluoro nucleoside
  modified_base 18: mod_base = OTHER; note = 2'-O-methoxy nucleoside
  modified_base 19: mod_base = OTHER; note = 2'-fluoro nucleoside
  modified_base 20: mod_base = OTHER; note = 2'-O-methoxy nucleoside
  modified_base 21: mod_base = OTHER; note = 2'-fluoro nucleoside
aggtctggaatgcaaagtcaa

SEQ ID NO: 218 - RNA, 21 nt, synthetic construct
  source 1..21: mol_type = other RNA
  modified_base 1: mod_base = OTHER; note = 2'-fluoro nucleoside with phosphorothioate bond
  modified_base 2: mod_base = OTHER; note = 2'-O-methoxy nucleoside with phosphorothioate bond
  modified_base 3: mod_base = OTHER; note = 2'-fluoro nucleoside
  modified_base 4: mod_base = OTHER; note = 2'-O-methoxy nucleoside
  modified_base 5: mod_base = OTHER; note = 2'-fluoro nucleoside
  modified_base 6: mod_base = OTHER; note = 2'-O-methoxy nucleoside
  modified_base 7: mod_base = OTHER; note = 2'-fluoro nucleoside
  modified_base 8: mod_base = OTHER; note = 2'-O-methoxy nucleoside
  modified_base 9: mod_base = OTHER; note = 2'-fluoro nucleoside
  modified_base 10: mod_base = OTHER; note = 2'-O-methoxy nucleoside
  modified_base 11: mod_base = OTHER; note = 2'-fluoro nucleoside
  modified_base 12: mod_base = OTHER; note = 2'-O-methoxy nucleoside
  modified_base 13: mod_base = OTHER; note = 2'-fluoro nucleoside
  modified_base 14: mod_base = OTHER; note = 2'-O-methoxy nucleoside
  modified_base 15: mod_base = OTHER; note = 2'-fluoro nucleoside
  modified_base 16: mod_base = OTHER; note = 2'-O-methoxy nucleoside
  modified_base 17: mod_base = OTHER; note = 2'-fluoro nucleoside
  modified_base 18: mod_base = OTHER; note = 2'-O-methoxy nucleoside
  modified_base 19: mod_base = OTHER; note = 2'-fluoro nucleoside
  modified_base 20: mod_base = OTHER; note = 2'-O-methoxy nucleoside
  modified_base 21: mod_base = OTHER; note = 2'-fluoro nucleoside
gaatgcaaagtcaaggagcat

SEQ ID NO: 219 - RNA, 21 nt, synthetic construct
  source 1..21: mol_type = other RNA
  modified_base 1: mod_base = OTHER; note = 2'-fluoro nucleoside with phosphorothioate bond
  modified_base 2: mod_base = OTHER; note = 2'-O-methoxy nucleoside with phosphorothioate bond
  modified_base 3: mod_base = OTHER; note = 2'-fluoro nucleoside
  modified_base 4: mod_base = OTHER; note = 2'-O-methoxy nucleoside
  modified_base 5: mod_base = OTHER; note = 2'-fluoro nucleoside
  modified_base 6: mod_base = OTHER; note = 2'-O-methoxy nucleoside
  modified_base 7: mod_base = OTHER; note = 2'-fluoro nucleoside
  modified_base 8: mod_base = OTHER; note = 2'-O-methoxy nucleoside
  modified_base 9: mod_base = OTHER; note = 2'-fluoro nucleoside
  modified_base 10: mod_base = OTHER; note = 2'-O-methoxy nucleoside
  modified_base 11: mod_base = OTHER; note = 2'-fluoro nucleoside
  modified_base 12: mod_base = OTHER; note = 2'-O-methoxy nucleoside
  modified_base 13: mod_base = OTHER; note = 2'-fluoro nucleoside
  modified_base 14: mod_base = OTHER; note = 2'-O-methoxy nucleoside
  modified_base 15: mod_base = OTHER; note = 2'-fluoro nucleoside
  modified_base 16: mod_base = OTHER; note = 2'-O-methoxy nucleoside
  modified_base 17: mod_base = OTHER; note = 2'-fluoro nucleoside
  modified_base 18: mod_base = OTHER; note = 2'-O-methoxy nucleoside
  modified_base 19: mod_base = OTHER; note = 2'-fluoro nucleoside
  modified_base 20: mod_base = OTHER; note = 2'-O-methoxy nucleoside
  modified_base 21: mod_base = OTHER; note = 2'-fluoro nucleoside
caaagtcaaggagcatggaat

SEQ ID NO: 220 - RNA, 21 nt, synthetic construct
  source 1..21: mol_type = other RNA
  modified_base 1: mod_base = OTHER; note = 2'-fluoro nucleoside with phosphorothioate bond
  modified_base 2: mod_base = OTHER; note = 2'-O-methoxy nucleoside with phosphorothioate bond
  modified_base 3: mod_base = OTHER; note = 2'-fluoro nucleoside
  modified_base 4: mod_base = OTHER; note = 2'-O-methoxy nucleoside
  modified_base 5: mod_base = OTHER; note = 2'-fluoro nucleoside
  modified_base 6: mod_base = OTHER; note = 2'-O-methoxy nucleoside
  modified_base 7: mod_base = OTHER; note = 2'-fluoro nucleoside
  modified_base 8: mod_base = OTHER; note = 2'-O-methoxy nucleoside
  modified_base 9: mod_base = OTHER; note = 2'-fluoro nucleoside
  modified_base 10: mod_base = OTHER; note = 2'-O-methoxy nucleoside
  modified_base 11: mod_base = OTHER; note = 2'-fluoro nucleoside
  modified_base 12: mod_base = OTHER; note = 2'-O-methoxy nucleoside
  modified_base 13: mod_base = OTHER; note = 2'-fluoro nucleoside
  modified_base 14: mod_base = OTHER; note = 2'-O-methoxy nucleoside
  modified_base 15: mod_base = OTHER; note = 2'-fluoro nucleoside
  modified_base 16: mod_base = OTHER; note = 2'-O-methoxy nucleoside
  modified_base 17: mod_base = OTHER; note = 2'-fluoro nucleoside
  modified_base 18: mod_base = OTHER; note = 2'-O-methoxy nucleoside
  modified_base 19: mod_base = OTHER; note = 2'-fluoro nucleoside
  modified_base 20: mod_base = OTHER; note = 2'-O-methoxy nucleoside
  modified_base 21: mod_base = OTHER; note = 2'-fluoro nucleoside
ccctcaggagcaggtgaccgt

SEQ ID NO: 221 - RNA, 21 nt, synthetic construct
  source 1..21: mol_type = other RNA
  modified_base 1: mod_base = OTHER; note = 2'-fluoro nucleoside with phosphorothioate bond
  modified_base 2: mod_base = OTHER; note = 2'-O-methoxy nucleoside with phosphorothioate bond
  modified_base 3: mod_base = OTHER; note = 2'-fluoro nucleoside
  modified_base 4: mod_base = OTHER; note = 2'-O-methoxy nucleoside
  modified_base 5: mod_base = OTHER; note = 2'-fluoro nucleoside
  modified_base 6: mod_base = OTHER; note = 2'-O-methoxy nucleoside
  modified_base 7: mod_base = OTHER; note = 2'-fluoro nucleoside
  modified_base 8: mod_base = OTHER; note = 2'-O-methoxy nucleoside
  modified_base 9: mod_base = OTHER; note = 2'-fluoro nucleoside
  modified_base 10: mod_base = OTHER; note = 2'-O-methoxy nucleoside
  modified_base 11: mod_base = OTHER; note = 2'-fluoro nucleoside
  modified_base 12: mod_base = OTHER; note = 2'-O-methoxy nucleoside
  modified_base 13: mod_base = OTHER; note = 2'-fluoro nucleoside
  modified_base 14: mod_base = OTHER; note = 2'-O-methoxy nucleoside
  modified_base 15: mod_base = OTHER; note = 2'-fluoro nucleoside
  modified_base 16: mod_base = OTHER; note = 2'-O-methoxy nucleoside
  modified_base 17: mod_base = OTHER; note = 2'-fluoro nucleoside
  modified_base 18: mod_base = OTHER; note = 2'-O-methoxy nucleoside
  modified_base 19: mod_base = OTHER; note = 2'-fluoro nucleoside
  modified_base 20: mod_base = OTHER; note = 2'-O-methoxy nucleoside
  modified_base 21: mod_base = OTHER; note = 2'-fluoro nucleoside
gaggagggctggaccctgact

SEQ ID NO: 222 - RNA, 21 nt, synthetic construct
  source 1..21: mol_type = other RNA
  modified_base 1: mod_base = OTHER; note = 2'-fluoro nucleoside with phosphorothioate bond
  modified_base 2: mod_base = OTHER; note = 2'-O-methoxy nucleoside with phosphorothioate bond
  modified_base 3: mod_base = OTHER; note = 2'-fluoro nucleoside
  modified_base 4: mod_base = OTHER; note = 2'-O-methoxy nucleoside
  modified_base 5: mod_base = OTHER; note = 2'-fluoro nucleoside
  modified_base 6: mod_base = OTHER; note = 2'-O-methoxy nucleoside
  modified_base 7: mod_base = OTHER; note = 2'-fluoro nucleoside
  modified_base 8: mod_base = OTHER; note = 2'-O-methoxy nucleoside
  modified_base 9: mod_base = OTHER; note = 2'-fluoro nucleoside
  modified_base 10: mod_base = OTHER; note = 2'-O-methoxy nucleoside
  modified_base 11: mod_base = OTHER; note = 2'-fluoro nucleoside
  modified_base 12: mod_base = OTHER; note = 2'-O-methoxy nucleoside
  modified_base 13: mod_base = OTHER; note = 2'-fluoro nucleoside
  modified_base 14: mod_base = OTHER; note = 2'-O-methoxy nucleoside
  modified_base 15: mod_base = OTHER; note = 2'-fluoro nucleoside
  modified_base 16: mod_base = OTHER; note = 2'-O-methoxy nucleoside
  modified_base 17: mod_base = OTHER; note = 2'-fluoro nucleoside
  modified_base 18: mod_base = OTHER; note = 2'-O-methoxy nucleoside
  modified_base 19: mod_base = OTHER; note = 2'-fluoro nucleoside
  modified_base 20: mod_base = OTHER; note = 2'-O-methoxy nucleoside
  modified_base 21: mod_base = OTHER; note = 2'-fluoro nucleoside
gctgcagtgccctccctggga

SEQ ID NO: 223 - RNA, 21 nt, synthetic construct
  source 1..21: mol_type = other RNA
  modified_base 1: mod_base = OTHER; note = 2'-fluoro nucleoside with phosphorothioate bond
  modified_base 2: mod_base = OTHER; note = 2'-O-methoxy nucleoside with phosphorothioate bond
  modified_base 3: mod_base = OTHER; note = 2'-fluoro nucleoside
  modified_base 4: mod_base = OTHER; note = 2'-O-methoxy nucleoside
  modified_base 5: mod_base = OTHER; note = 2'-fluoro nucleoside
  modified_base 6: mod_base = OTHER; note = 2'-O-methoxy nucleoside
  modified_base 7: mod_base = OTHER; note = 2'-fluoro nucleoside
  modified_base 8: mod_base = OTHER; note = 2'-O-methoxy nucleoside
  modified_base 9: mod_base = OTHER; note = 2'-fluoro nucleoside
  modified_base 10: mod_base = OTHER; note = 2'-O-methoxy nucleoside
  modified_base 11: mod_base = OTHER; note = 2'-fluoro nucleoside
  modified_base 12: mod_base = OTHER; note = 2'-O-methoxy nucleoside
  modified_base 13: mod_base = OTHER; note = 2'-fluoro nucleoside
  modified_base 14: mod_base = OTHER; note = 2'-O-methoxy nucleoside
  modified_base 15: mod_base = OTHER; note = 2'-fluoro nucleoside
  modified_base 16: mod_base = OTHER; note = 2'-O-methoxy nucleoside
  modified_base 17: mod_base = OTHER; note = 2'-fluoro nucleoside
  modified_base 18: mod_base = OTHER; note = 2'-O-methoxy nucleoside
  modified_base 19: mod_base = OTHER; note = 2'-fluoro nucleoside
  modified_base 20: mod_base = OTHER; note = 2'-O-methoxy nucleoside
  modified_base 21: mod_base = OTHER; note = 2'-fluoro nucleoside
cctccctgggacctcccacgt

SEQ ID NO: 224 - RNA, 21 nt, synthetic construct
  source 1..21: mol_type = other RNA
  modified_base 1: mod_base = OTHER; note = 2'-fluoro nucleoside with phosphorothioate bond
  modified_base 2: mod_base = OTHER; note = 2'-O-methoxy nucleoside with phosphorothioate bond
  modified_base 3: mod_base = OTHER; note = 2'-fluoro nucleoside
  modified_base 4: mod_base = OTHER; note = 2'-O-methoxy nucleoside
  modified_base 5: mod_base = OTHER; note = 2'-fluoro nucleoside
  modified_base 6: mod_base = OTHER; note = 2'-O-methoxy nucleoside
  modified_base 7: mod_base = OTHER; note = 2'-fluoro nucleoside
  modified_base 8: mod_base = OTHER; note = 2'-O-methoxy nucleoside
  modified_base 9: mod_base = OTHER; note = 2'-fluoro nucleoside
  modified_base 10: mod_base = OTHER; note = 2'-O-methoxy nucleoside
  modified_base 11: mod_base = OTHER; note = 2'-fluoro nucleoside
  modified_base 12: mod_base = OTHER; note = 2'-O-methoxy nucleoside
  modified_base 13: mod_base = OTHER; note = 2'-fluoro nucleoside
  modified_base 14: mod_base = OTHER; note = 2'-O-methoxy nucleoside
  modified_base 15: mod_base = OTHER; note = 2'-fluoro nucleoside
  modified_base 16: mod_base = OTHER; note = 2'-O-methoxy nucleoside
  modified_base 17: mod_base = OTHER; note = 2'-fluoro nucleoside
  modified_base 18: mod_base = OTHER; note = 2'-O-methoxy nucleoside
  modified_base 19: mod_base = OTHER; note = 2'-fluoro nucleoside
  modified_base 20: mod_base = OTHER; note = 2'-O-methoxy nucleoside
  modified_base 21: mod_base = OTHER; note = 2'-fluoro nucleoside
ccctgggacctcccacgtcct

SEQ ID NO: 225 - RNA, 21 nt, synthetic construct
  source 1..21: mol_type = other RNA
  modified_base 1: mod_base = OTHER; note = 2'-fluoro nucleoside with phosphorothioate bond
  modified_base 2: mod_base = OTHER; note = 2'-O-methoxy nucleoside with phosphorothioate bond
  modified_base 3: mod_base = OTHER; note = 2'-fluoro nucleoside
  modified_base 4: mod_base = OTHER; note = 2'-O-methoxy nucleoside
  modified_base 5: mod_base = OTHER; note = 2'-fluoro nucleoside
  modified_base 6: mod_base = OTHER; note = 2'-O-methoxy nucleoside
  modified_base 7: mod_base = OTHER; note = 2'-fluoro nucleoside
  modified_base 8: mod_base = OTHER; note = 2'-O-methoxy nucleoside
  modified_base 9: mod_base = OTHER; note = 2'-fluoro nucleoside
  modified_base 10: mod_base = OTHER; note = 2'-O-methoxy nucleoside
  modified_base 11: mod_base = OTHER; note = 2'-fluoro nucleoside
  modified_base 12: mod_base = OTHER; note = 2'-O-methoxy nucleoside
  modified_base 13: mod_base = OTHER; note = 2'-fluoro nucleoside
  modified_base 14: mod_base = OTHER; note = 2'-O-methoxy nucleoside
  modified_base 15: mod_base = OTHER; note = 2'-fluoro nucleoside
  modified_base 16: mod_base = OTHER; note = 2'-O-methoxy nucleoside
  modified_base 17: mod_base = OTHER; note = 2'-fluoro nucleoside
  modified_base 18: mod_base = OTHER; note = 2'-O-methoxy nucleoside
  modified_base 19: mod_base = OTHER; note = 2'-fluoro nucleoside
  modified_base 20: mod_base = OTHER; note = 2'-O-methoxy nucleoside
  modified_base 21: mod_base = OTHER; note = 2'-fluoro nucleoside
gggcctacgccgtagacaaca

SEQ ID NO: 226 - RNA, 21 nt, synthetic construct
  source 1..21: mol_type = other RNA
  modified_base 1: mod_base = OTHER; note = 2'-fluoro nucleoside with phosphorothioate bond
  modified_base 2: mod_base = OTHER; note = 2'-O-methoxy nucleoside with phosphorothioate bond
  modified_base 3: mod_base = OTHER; note = 2'-fluoro nucleoside
  modified_base 4: mod_base = OTHER; note = 2'-O-methoxy nucleoside
  modified_base 5: mod_base = OTHER; note = 2'-fluoro nucleoside
  modified_base 6: mod_base = OTHER; note = 2'-O-methoxy nucleoside
  modified_base 7: mod_base = OTHER; note = 2'-fluoro nucleoside
  modified_base 8: mod_base = OTHER; note = 2'-O-methoxy nucleoside
  modified_base 9: mod_base = OTHER; note = 2'-fluoro nucleoside
  modified_base 10: mod_base = OTHER; note = 2'-O-methoxy nucleoside
  modified_base 11: mod_base = OTHER; note = 2'-fluoro nucleoside
  modified_base 12: mod_base = OTHER; note = 2'-O-methoxy nucleoside
  modified_base 13: mod_base = OTHER; note = 2'-fluoro nucleoside
  modified_base 14: mod_base = OTHER; note = 2'-O-methoxy nucleoside
  modified_base 15: mod_base = OTHER; note = 2'-fluoro nucleoside
  modified_base 16: mod_base = OTHER; note = 2'-O-methoxy nucleoside
  modified_base 17: mod_base = OTHER; note = 2'-fluoro nucleoside
  modified_base 18: mod_base = OTHER; note = 2'-O-methoxy nucleoside
  modified_base 19: mod_base = OTHER; note = 2'-fluoro nucleoside
  modified_base 20: mod_base = OTHER; note = 2'-O-methoxy nucleoside
  modified_base 21: mod_base = OTHER; note = 2'-fluoro nucleoside
gccgtagacaacacgtgtgta

SEQ ID NO: 227 - RNA, 21 nt, synthetic construct
  source 1..21: mol_type = other RNA
  modified_base 1: mod_base = OTHER; note = 2'-fluoro nucleoside with phosphorothioate bond
  modified_base 2: mod_base = OTHER; note = 2'-O-methoxy nucleoside with phosphorothioate bond
  modified_base 3: mod_base = OTHER; note = 2'-fluoro nucleoside
  modified_base 4: mod_base = OTHER; note = 2'-O-methoxy nucleoside
  modified_base 5: mod_base = OTHER; note = 2'-fluoro nucleoside
  modified_base 6: mod_base = OTHER; note = 2'-O-methoxy nucleoside
  modified_base 7: mod_base = OTHER; note = 2'-fluoro nucleoside
  modified_base 8: mod_base = OTHER; note = 2'-O-methoxy nucleoside
  modified_base 9: mod_base = OTHER; note = 2'-fluoro nucleoside
  modified_base 10: mod_base = OTHER; note = 2'-O-methoxy nucleoside
  modified_base 11: mod_base = OTHER; note = 2'-fluoro nucleoside
  modified_base 12: mod_base = OTHER; note = 2'-O-methoxy nucleoside
  modified_base 13: mod_base = OTHER; note = 2'-fluoro nucleoside
  modified_base 14: mod_base = OTHER; note = 2'-O-methoxy nucleoside
  modified_base 15: mod_base = OTHER; note = 2'-fluoro nucleoside
  modified_base 16: mod_base = OTHER; note = 2'-O-methoxy nucleoside
  modified_base 17: mod_base = OTHER; note = 2'-fluoro nucleoside
  modified_base 18: mod_base = OTHER; note = 2'-O-methoxy nucleoside
  modified_base 19: mod_base = OTHER; note = 2'-fluoro nucleoside
  modified_base 20: mod_base = OTHER; note = 2'-O-methoxy nucleoside
  modified_base 21: mod_base = OTHER; note = 2'-fluoro nucleoside
ccgtagacaacacgtgtgtag

SEQ ID NO: 228 - RNA, 21 nt, synthetic construct
  source 1..21: mol_type = other RNA
  modified_base 1: mod_base = OTHER; note = 2'-fluoro nucleoside with phosphorothioate bond
  modified_base 2: mod_base = OTHER; note = 2'-O-methoxy nucleoside with phosphorothioate bond
  modified_base 3: mod_base = OTHER; note = 2'-fluoro nucleoside
  modified_base 4: mod_base = OTHER; note = 2'-O-methoxy nucleoside
  modified_base 5: mod_base = OTHER; note = 2'-fluoro nucleoside
  modified_base 6: mod_base = OTHER; note = 2'-O-methoxy nucleoside
  modified_base 7: mod_base = OTHER; note = 2'-fluoro nucleoside
  modified_base 8: mod_base = OTHER; note = 2'-O-methoxy nucleoside
  modified_base 9: mod_base = OTHER; note = 2'-fluoro nucleoside
  modified_base 10: mod_base = OTHER; note = 2'-O-methoxy nucleoside
  modified_base 11: mod_base = OTHER; note = 2'-fluoro nucleoside
  modified_base 12: mod_base = OTHER; note = 2'-O-methoxy nucleoside
  modified_base 13: mod_base = OTHER; note = 2'-fluoro nucleoside
  modified_base 14: mod_base = OTHER; note = 2'-O-methoxy nucleoside
  modified_base 15: mod_base = OTHER; note = 2'-fluoro nucleoside
  modified_base 16: mod_base = OTHER; note = 2'-O-methoxy nucleoside
  modified_base 17: mod_base = OTHER; note = 2'-fluoro nucleoside
  modified_base 18: mod_base = OTHER; note = 2'-O-methoxy nucleoside
  modified_base 19: mod_base = OTHER; note = 2'-fluoro nucleoside
  modified_base 20: mod_base = OTHER; note = 2'-O-methoxy nucleoside
  modified_base 21: mod_base = OTHER; note = 2'-fluoro nucleoside
tagacaacacgtgtgtagtca

SEQ ID NO: 229 - RNA, 21 nt, synthetic construct
  source 1..21: mol_type = other RNA
  modified_base 1: mod_base = OTHER; note = 2'-fluoro nucleoside with phosphorothioate bond
  modified_base 2: mod_base = OTHER; note = 2'-O-methoxy nucleoside with phosphorothioate bond
  modified_base 3: mod_base = OTHER; note = 2'-fluoro nucleoside
  modified_base 4: mod_base = OTHER; note = 2'-O-methoxy nucleoside
  modified_base 5: mod_base = OTHER; note = 2'-fluoro nucleoside
  modified_base 6: mod_base = OTHER; note = 2'-O-methoxy nucleoside
  modified_base 7: mod_base = OTHER; note = 2'-fluoro nucleoside
  modified_base 8: mod_base = OTHER; note = 2'-O-methoxy nucleoside
  modified_base 9: mod_base = OTHER; note = 2'-fluoro nucleoside
  modified_base 10: mod_base = OTHER; note = 2'-O-methoxy nucleoside
  modified_base 11: mod_base = OTHER; note = 2'-fluoro nucleoside
  modified_base 12: mod_base = OTHER; note = 2'-O-methoxy nucleoside
  modified_base 13: mod_base = OTHER; note = 2'-fluoro nucleoside
  modified_base 14: mod_base = OTHER; note = 2'-O-methoxy nucleoside
  modified_base 15: mod_base = OTHER; note = 2'-fluoro nucleoside
  modified_base 16: mod_base = OTHER; note = 2'-O-methoxy nucleoside
  modified_base 17: mod_base = OTHER; note = 2'-fluoro nucleoside
  modified_base 18: mod_base = OTHER; note = 2'-O-methoxy nucleoside
  modified_base 19: mod_base = OTHER; note = 2'-fluoro nucleoside
  modified_base 20: mod_base = OTHER; note = 2'-O-methoxy nucleoside
  modified_base 21: mod_base = OTHER; note = 2'-fluoro nucleoside
gtgtgtagtcaggagccggga

SEQ ID NO: 230 - RNA, 21 nt, synthetic construct
  source 1..21: mol_type = other RNA
  modified_base 1: mod_base = OTHER; note = 2'-fluoro nucleoside with phosphorothioate bond
  modified_base 2: mod_base = OTHER; note = 2'-O-methoxy nucleoside with phosphorothioate bond
  modified_base 3: mod_base = OTHER; note = 2'-fluoro nucleoside
  modified_base 4: mod_base = OTHER; note = 2'-O-methoxy nucleoside
  modified_base 5: mod_base = OTHER; note = 2'-fluoro nucleoside
  modified_base 6: mod_base = OTHER; note = 2'-O-methoxy nucleoside
  modified_base 7: mod_base = OTHER; note = 2'-fluoro nucleoside
  modified_base 8: mod_base = OTHER; note = 2'-O-methoxy nucleoside
  modified_base 9: mod_base = OTHER; note = 2'-fluoro nucleoside
  modified_base 10: mod_base = OTHER; note = 2'-O-methoxy nucleoside
  modified_base 11: mod_base = OTHER; note = 2'-fluoro nucleoside
  modified_base 12: mod_base = OTHER; note = 2'-O-methoxy nucleoside
  modified_base 13: mod_base = OTHER; note = 2'-fluoro nucleoside
  modified_base 14: mod_base = OTHER; note = 2'-O-methoxy nucleoside
  modified_base 15: mod_base = OTHER; note = 2'-fluoro nucleoside
  modified_base 16: mod_base = OTHER; note = 2'-O-methoxy nucleoside
  modified_base 17: mod_base = OTHER; note = 2'-fluoro nucleoside
  modified_base 18: mod_base = OTHER; note = 2'-O-methoxy nucleoside
  modified_base 19: mod_base = OTHER; note = 2'-fluoro nucleoside
  modified_base 20: mod_base = OTHER; note = 2'-O-methoxy nucleoside
  modified_base 21: mod_base = OTHER; note = 2'-fluoro nucleoside
gagccgggacgtcagcactac

SEQ ID NO: 231 - RNA, 21 nt, synthetic construct
  source 1..21: mol_type = other RNA
  modified_base 1: mod_base = OTHER; note = 2'-fluoro nucleoside with phosphorothioate bond
  modified_base 2: mod_base = OTHER; note = 2'-O-methoxy nucleoside with phosphorothioate bond
  modified_base 3: mod_base = OTHER; note = 2'-fluoro nucleoside
  modified_base 4: mod_base = OTHER; note = 2'-O-methoxy nucleoside
  modified_base 5: mod_base = OTHER; note = 2'-fluoro nucleoside
  modified_base 6: mod_base = OTHER; note = 2'-O-methoxy nucleoside
  modified_base 7: mod_base = OTHER; note = 2'-fluoro nucleoside
  modified_base 8: mod_base = OTHER; note = 2'-O-methoxy nucleoside
  modified_base 9: mod_base = OTHER; note = 2'-fluoro nucleoside
  modified_base 10: mod_base = OTHER; note = 2'-O-methoxy nucleoside
  modified_base 11: mod_base = OTHER; note = 2'-fluoro nucleoside
  modified_base 12: mod_base = OTHER; note = 2'-O-methoxy nucleoside
  modified_base 13: mod_base = OTHER; note = 2'-fluoro nucleoside
  modified_base 14: mod_base = OTHER; note = 2'-O-methoxy nucleoside
  modified_base 15: mod_base = OTHER; note = 2'-fluoro nucleoside
  modified_base 16: mod_base = OTHER; note = 2'-O-methoxy nucleoside
  modified_base 17: mod_base = OTHER; note = 2'-fluoro nucleoside
  modified_base 18: mod_base = OTHER; note = 2'-O-methoxy nucleoside
  modified_base 19: mod_base = OTHER; note = 2'-fluoro nucleoside
  modified_base 20: mod_base = OTHER; note = 2'-O-methoxy nucleoside
  modified_base 21: mod_base = OTHER; note = 2'-fluoro nucleoside
tcagcactacaggcagcacca

SEQ ID NO: 232 - RNA, 21 nt, synthetic construct
  source 1..21: mol_type = other RNA
  modified_base 1: mod_base = OTHER; note = 2'-fluoro nucleoside with phosphorothioate bond
  modified_base 2: mod_base = OTHER; note = 2'-O-methoxy nucleoside with phosphorothioate bond
  modified_base 3: mod_base = OTHER; note = 2'-fluoro nucleoside
  modified_base 4: mod_base = OTHER; note = 2'-O-methoxy nucleoside
  modified_base 5: mod_base = OTHER; note = 2'-fluoro nucleoside
  modified_base 6: mod_base = OTHER; note = 2'-O-methoxy nucleoside
  modified_base 7: mod_base = OTHER; note = 2'-fluoro nucleoside
  modified_base 8: mod_base = OTHER; note = 2'-O-methoxy nucleoside
  modified_base 9: mod_base = OTHER; note = 2'-fluoro nucleoside
  modified_base 10: mod_base = OTHER; note = 2'-O-methoxy nucleoside
  modified_base 11: mod_base = OTHER; note = 2'-fluoro nucleoside
  modified_base 12: mod_base = OTHER; note = 2'-O-methoxy nucleoside
  modified_base 13: mod_base = OTHER; note = 2'-fluoro nucleoside
  modified_base 14: mod_base = OTHER; note = 2'-O-methoxy nucleoside
  modified_base 15: mod_base = OTHER; note = 2'-fluoro nucleoside
  modified_base 16: mod_base = OTHER; note = 2'-O-methoxy nucleoside
  modified_base 17: mod_base = OTHER; note = 2'-fluoro nucleoside
  modified_base 18: mod_base = OTHER; note = 2'-O-methoxy nucleoside
  modified_base 19: mod_base = OTHER; note = 2'-fluoro nucleoside
  modified_base 20: mod_base = OTHER; note = 2'-O-methoxy nucleoside
  modified_base 21: mod_base = OTHER; note = 2'-fluoro nucleoside
tctccagctaactgtggagaa

SEQ ID NO: 233 - RNA, 21 nt, synthetic construct
  source 1..21: mol_type = other RNA
  modified_base 1: mod_base = OTHER; note = 2'-fluoro nucleoside with phosphorothioate bond
  modified_base 2: mod_base = OTHER; note = 2'-O-methoxy nucleoside with phosphorothioate bond
  modified_base 3: mod_base = OTHER; note = 2'-fluoro nucleoside
  modified_base 4: mod_base = OTHER; note = 2'-O-methoxy nucleoside
  modified_base 5: mod_base = OTHER; note = 2'-fluoro nucleoside
  modified_base 6: mod_base = OTHER; note = 2'-O-methoxy nucleoside
  modified_base 7: mod_base = OTHER; note = 2'-fluoro nucleoside
  modified_base 8: mod_base = OTHER; note = 2'-O-methoxy nucleoside
  modified_base 9: mod_base = OTHER; note = 2'-fluoro nucleoside
  modified_base 10: mod_base = OTHER; note = 2'-O-methoxy nucleoside
  modified_base 11: mod_base = OTHER; note = 2'-fluoro nucleoside
  modified_base 12: mod_base = OTHER; note = 2'-O-methoxy nucleoside
  modified_base 13: mod_base = OTHER; note = 2'-fluoro nucleoside
  modified_base 14: mod_base = OTHER; note = 2'-O-methoxy nucleoside
  modified_base 15: mod_base = OTHER; note = 2'-fluoro nucleoside
  modified_base 16: mod_base = OTHER; note = 2'-O-methoxy nucleoside
  modified_base 17: mod_base = OTHER; note = 2'-fluoro nucleoside
  modified_base 18: mod_base = OTHER; note = 2'-O-methoxy nucleoside
  modified_base 19: mod_base = OTHER; note = 2'-fluoro nucleoside
  modified_base 20: mod_base = OTHER; note = 2'-O-methoxy nucleoside
  modified_base 21: mod_base = OTHER; note = 2'-fluoro nucleoside
gctccctgattaatggaggct

SEQ ID NO: 234 - RNA, 21 nt, synthetic construct
  source 1..21: mol_type = other RNA
  modified_base 1: mod_base = OTHER; note = 2'-fluoro nucleoside with phosphorothioate bond
  modified_base 2: mod_base = OTHER; note = 2'-O-methoxy nucleoside with phosphorothioate bond
  modified_base 3: mod_base = OTHER; note = 2'-fluoro nucleoside
  modified_base 4: mod_base = OTHER; note = 2'-O-methoxy nucleoside
  modified_base 5: mod_base = OTHER; note = 2'-fluoro nucleoside
  modified_base 6: mod_base = OTHER; note = 2'-O-methoxy nucleoside
  modified_base 7: mod_base = OTHER; note = 2'-fluoro nucleoside
  modified_base 8: mod_base = OTHER; note = 2'-O-methoxy nucleoside
  modified_base 9: mod_base = OTHER; note = 2'-fluoro nucleoside
  modified_base 10: mod_base = OTHER; note = 2'-O-methoxy nucleoside
  modified_base 11: mod_base = OTHER; note = 2'-fluoro nucleoside
  modified_base 12: mod_base = OTHER; note = 2'-O-methoxy nucleoside
  modified_base 13: mod_base = OTHER; note = 2'-fluoro nucleoside
  modified_base 14: mod_base = OTHER; note = 2'-O-methoxy nucleoside
  modified_base 15: mod_base = OTHER; note = 2'-fluoro nucleoside
  modified_base 16: mod_base = OTHER; note = 2'-O-methoxy nucleoside
  modified_base 17: mod_base = OTHER; note = 2'-fluoro nucleoside
  modified_base 18: mod_base = OTHER; note = 2'-O-methoxy nucleoside
  modified_base 19: mod_base = OTHER; note = 2'-fluoro nucleoside
  modified_base 20: mod_base = OTHER; note = 2'-O-methoxy nucleoside
  modified_base 21: mod_base = OTHER; note = 2'-fluoro nucleoside
tccctgattaatggaggctta

SEQ ID NO: 235 - RNA, 21 nt, synthetic construct
  source 1..21: mol_type = other RNA
  modified_base 1: mod_base = OTHER; note = 2'-fluoro nucleoside with phosphorothioate bond
  modified_base 2: mod_base = OTHER; note = 2'-O-methoxy nucleoside with phosphorothioate bond
  modified_base 3: mod_base = OTHER; note = 2'-fluoro nucleoside
  modified_base 4: mod_base = OTHER; note = 2'-O-methoxy nucleoside
  modified_base 5: mod_base = OTHER; note = 2'-fluoro nucleoside
  modified_base 6: mod_base = OTHER; note = 2'-O-methoxy nucleoside
  modified_base 7: mod_base = OTHER; note = 2'-fluoro nucleoside
  modified_base 8: mod_base = OTHER; note = 2'-O-methoxy nucleoside
  modified_base 9: mod_base = OTHER; note = 2'-fluoro nucleoside
  modified_base 10: mod_base = OTHER; note = 2'-O-methoxy nucleoside
  modified_base 11: mod_base = OTHER; note = 2'-fluoro nucleoside
  modified_base 12: mod_base = OTHER; note = 2'-O-methoxy nucleoside
  modified_base 13: mod_base = OTHER; note = 2'-fluoro nucleoside
  modified_base 14: mod_base = OTHER; note = 2'-O-methoxy nucleoside
  modified_base 15: mod_base = OTHER; note = 2'-fluoro nucleoside
  modified_base 16: mod_base = OTHER; note = 2'-O-methoxy nucleoside
  modified_base 17: mod_base = OTHER; note = 2'-fluoro nucleoside
  modified_base 18: mod_base = OTHER; note = 2'-O-methoxy nucleoside
  modified_base 19: mod_base = OTHER; note = 2'-fluoro nucleoside
  modified_base 20: mod_base = OTHER; note = 2'-O-methoxy nucleoside
  modified_base 21: mod_base = OTHER; note = 2'-fluoro nucleoside
cctgattaatggaggcttagc

SEQ ID NO: 236 - RNA, 21 nt, synthetic construct
  source 1..21: mol_type = other RNA
  modified_base 1: mod_base = OTHER; note = 2'-fluoro nucleoside with phosphorothioate bond
  modified_base 2: mod_base = OTHER; note = 2'-O-methoxy nucleoside with phosphorothioate bond
  modified_base 3: mod_base = OTHER; note = 2'-fluoro nucleoside
  modified_base 4: mod_base = OTHER; note = 2'-O-methoxy nucleoside
  modified_base 5: mod_base = OTHER; note = 2'-fluoro nucleoside
  modified_base 6: mod_base = OTHER; note = 2'-O-methoxy nucleoside
  modified_base 7: mod_base = OTHER; note = 2'-fluoro nucleoside
  modified_base 8: mod_base = OTHER; note = 2'-O-methoxy nucleoside
  modified_base 9: mod_base = OTHER; note = 2'-fluoro nucleoside
  modified_base 10: mod_base = OTHER; note = 2'-O-methoxy nucleoside
  modified_base 11: mod_base = OTHER; note = 2'-fluoro nucleoside
  modified_base 12: mod_base = OTHER; note = 2'-O-methoxy nucleoside
  modified_base 13: mod_base = OTHER; note = 2'-fluoro nucleoside
  modified_base 14: mod_base = OTHER; note = 2'-O-methoxy nucleoside
  modified_base 15: mod_base = OTHER; note = 2'-fluoro nucleoside
  modified_base 16: mod_base = OTHER; note = 2'-O-methoxy nucleoside
  modified_base 17: mod_base = OTHER; note = 2'-fluoro nucleoside
  modified_base 18: mod_base = OTHER; note = 2'-O-methoxy nucleoside
  modified_base 19: mod_base = OTHER; note = 2'-fluoro nucleoside
  modified_base 20: mod_base = OTHER; note = 2'-O-methoxy nucleoside
  modified_base 21: mod_base = OTHER; note = 2'-fluoro nucleoside
gattaatggaggcttagcttt

SEQ ID NO: 237 - RNA, 21 nt, synthetic construct
  source 1..21: mol_type = other RNA
  modified_base 1: mod_base = OTHER; note = 2'-fluoro nucleoside with phosphorothioate bond
  modified_base 2: mod_base = OTHER; note = 2'-O-methoxy nucleoside with phosphorothioate bond
  modified_base 3: mod_base = OTHER; note = 2'-fluoro nucleoside
  modified_base 4: mod_base = OTHER; note = 2'-O-methoxy nucleoside
  modified_base 5: mod_base = OTHER; note = 2'-fluoro nucleoside
  modified_base 6: mod_base = OTHER; note = 2'-O-methoxy nucleoside
  modified_base 7: mod_base = OTHER; note = 2'-fluoro nucleoside
  modified_base 8: mod_base = OTHER; note = 2'-O-methoxy nucleoside
  modified_base 9: mod_base = OTHER; note = 2'-fluoro nucleoside
  modified_base 10: mod_base = OTHER; note = 2'-O-methoxy nucleoside
  modified_base 11: mod_base = OTHER; note = 2'-fluoro nucleoside
  modified_base 12: mod_base = OTHER; note = 2'-O-methoxy nucleoside
  modified_base 13: mod_base = OTHER; note = 2'-fluoro nucleoside
  modified_base 14: mod_base = OTHER; note = 2'-O-methoxy nucleoside
  modified_base 15: mod_base = OTHER; note = 2'-fluoro nucleoside
  modified_base 16: mod_base = OTHER; note = 2'-O-methoxy nucleoside
  modified_base 17: mod_base = OTHER; note = 2'-fluoro nucleoside
  modified_base 18: mod_base = OTHER; note = 2'-O-methoxy nucleoside
  modified_base 19: mod_base = OTHER; note = 2'-fluoro nucleoside
  modified_base 20: mod_base = OTHER; note = 2'-O-methoxy nucleoside
  modified_base 21: mod_base = OTHER; note = 2'-fluoro nucleoside
ggtggtcacaggctgtgcctt

SEQ ID NO: 238 - RNA, 21 nt, synthetic construct
  source 1..21: mol_type = other RNA
  modified_base 1: mod_base = OTHER; note = 2'-fluoro nucleoside with phosphorothioate bond
  modified_base 2: mod_base = OTHER; note = 2'-O-methoxy nucleoside with phosphorothioate bond
  modified_base 3: mod_base = OTHER; note = 2'-fluoro nucleoside
  modified_base 4: mod_base = OTHER; note = 2'-O-methoxy nucleoside
  modified_base 5: mod_base = OTHER; note = 2'-fluoro nucleoside
  modified_base 6: mod_base = OTHER; note = 2'-O-methoxy nucleoside
  modified_base 7: mod_base = OTHER; note = 2'-fluoro nucleoside
  modified_base 8: mod_base = OTHER; note = 2'-O-methoxy nucleoside
  modified_base 9: mod_base = OTHER; note = 2'-fluoro nucleoside
  modified_base 10: mod_base = OTHER; note = 2'-O-methoxy nucleoside
  modified_base 11: mod_base = OTHER; note = 2'-fluoro nucleoside
  modified_base 12: mod_base = OTHER; note = 2'-O-methoxy nucleoside
  modified_base 13: mod_base = OTHER; note = 2'-fluoro nucleoside
  modified_base 14: mod_base = OTHER; note = 2'-O-methoxy nucleoside
  modified_base 15: mod_base = OTHER; note = 2'-fluoro nucleoside
  modified_base 16: mod_base = OTHER; note = 2'-O-methoxy nucleoside
  modified_base 17: mod_base = OTHER; note = 2'-fluoro nucleoside
  modified_base 18: mod_base = OTHER; note = 2'-O-methoxy nucleoside
  modified_base 19: mod_base = OTHER; note = 2'-fluoro nucleoside
  modified_base 20: mod_base = OTHER; note = 2'-O-methoxy nucleoside
  modified_base 21: mod_base = OTHER; note = 2'-fluoro nucleoside
tcacaggctgtgccttggttt

SEQ ID NO: 239 - RNA, 21 nt, synthetic construct
  source 1..21: mol_type = other RNA
  modified_base 1: mod_base = OTHER; note = 2'-fluoro nucleoside with phosphorothioate bond
  modified_base 2: mod_base = OTHER; note = 2'-O-methoxy nucleoside with phosphorothioate bond
  modified_base 3: mod_base = OTHER; note = 2'-fluoro nucleoside
  modified_base 4: mod_base = OTHER; note = 2'-O-methoxy nucleoside
  modified_base 5: mod_base = OTHER; note = 2'-fluoro nucleoside
  modified_base 6: mod_base = OTHER; note = 2'-O-methoxy nucleoside
  modified_base 7: mod_base = OTHER; note = 2'-fluoro nucleoside
  modified_base 8: mod_base = OTHER; note = 2'-O-methoxy nucleoside
  modified_base 9: mod_base = OTHER; note = 2'-fluoro nucleoside
  modified_base 10: mod_base = OTHER; note = 2'-O-methoxy nucleoside
  modified_base 11: mod_base = OTHER; note = 2'-fluoro nucleoside
  modified_base 12: mod_base = OTHER; note = 2'-O-methoxy nucleoside
  modified_base 13: mod_base = OTHER; note = 2'-fluoro nucleoside
  modified_base 14: mod_base = OTHER; note = 2'-O-methoxy nucleoside
  modified_base 15: mod_base = OTHER; note = 2'-fluoro nucleoside
  modified_base 16: mod_base = OTHER; note = 2'-O-methoxy nucleoside
  modified_base 17: mod_base = OTHER; note = 2'-fluoro nucleoside
  modified_base 18: mod_base = OTHER; note = 2'-O-methoxy nucleoside
  modified_base 19: mod_base = OTHER; note = 2'-fluoro nucleoside
  modified_base 20: mod_base = OTHER; note = 2'-O-methoxy nucleoside
  modified_base 21: mod_base = OTHER; note = 2'-fluoro nucleoside
gtgccttggtttcctgagcca

SEQ ID NO: 240 - RNA, 21 nt, synthetic construct
  source 1..21: mol_type = other RNA
  modified_base 1: mod_base = OTHER; note = 2'-fluoro nucleoside with phosphorothioate bond
  modified_base 2: mod_base = OTHER; note = 2'-O-methoxy nucleoside with phosphorothioate bond
  modified_base 3: mod_base = OTHER; note = 2'-fluoro nucleoside
  modified_base 4: mod_base = OTHER; note = 2'-O-methoxy nucleoside
  modified_base 5: mod_base = OTHER; note = 2'-fluoro nucleoside
  modified_base 6: mod_base = OTHER; note = 2'-O-methoxy nucleoside
  modified_base 7: mod_base = OTHER; note = 2'-fluoro nucleoside
  modified_base 8: mod_base = OTHER; note = 2'-O-methoxy nucleoside
  modified_base 9: mod_base = OTHER; note = 2'-fluoro nucleoside
  modified_base 10: mod_base = OTHER; note = 2'-O-methoxy nucleoside
  modified_base 11: mod_base = OTHER; note = 2'-fluoro nucleoside
  modified_base 12: mod_base = OTHER; note = 2'-O-methoxy nucleoside
  modified_base 13: mod_base = OTHER; note = 2'-fluoro nucleoside
  modified_base 14: mod_base = OTHER; note = 2'-O-methoxy nucleoside
  modified_base 15: mod_base = OTHER; note = 2'-fluoro nucleoside
  modified_base 16: mod_base = OTHER; note = 2'-O-methoxy nucleoside
  modified_base 17: mod_base = OTHER; note = 2'-fluoro nucleoside
  modified_base 18: mod_base = OTHER; note = 2'-O-methoxy nucleoside
  modified_base 19: mod_base = OTHER; note = 2'-fluoro nucleoside
  modified_base 20: mod_base = OTHER; note = 2'-O-methoxy nucleoside
  modified_base 21: mod_base = OTHER; note = 2'-fluoro nucleoside
agccacctttactctgctcta

SEQ ID NO: 241 - RNA, 21 nt, synthetic construct
  source 1..21: mol_type = other RNA
  modified_base 1: mod_base = OTHER; note = 2'-fluoro nucleoside with phosphorothioate bond
  modified_base 2: mod_base = OTHER; note = 2'-O-methoxy nucleoside with phosphorothioate bond
  modified_base 3: mod_base = OTHER; note = 2'-fluoro nucleoside
  modified_base 4: mod_base = OTHER; note = 2'-O-methoxy nucleoside
  modified_base 5: mod_base = OTHER; note = 2'-fluoro nucleoside
  modified_base 6: mod_base = OTHER; note = 2'-O-methoxy nucleoside
  modified_base 7: mod_base = OTHER; note = 2'-fluoro nucleoside
  modified_base 8: mod_base = OTHER; note = 2'-O-methoxy nucleoside
  modified_base 9: mod_base = OTHER; note = 2'-fluoro nucleoside
  modified_base 10: mod_base = OTHER; note = 2'-O-methoxy nucleoside
  modified_base 11: mod_base = OTHER; note = 2'-fluoro nucleoside
  modified_base 12: mod_base = OTHER; note = 2'-O-methoxy nucleoside
  modified_base 13: mod_base = OTHER; note = 2'-fluoro nucleoside
  modified_base 14: mod_base = OTHER; note = 2'-O-methoxy nucleoside
  modified_base 15: mod_base = OTHER; note = 2'-fluoro nucleoside
  modified_base 16: mod_base = OTHER; note = 2'-O-methoxy nucleoside
  modified_base 17: mod_base = OTHER; note = 2'-fluoro nucleoside
  modified_base 18: mod_base = OTHER; note = 2'-O-methoxy nucleoside
  modified_base 19: mod_base = OTHER; note = 2'-fluoro nucleoside
  modified_base 20: mod_base = OTHER; note = 2'-O-methoxy nucleoside
  modified_base 21: mod_base = OTHER; note = 2'-fluoro nucleoside
ccacctttactctgctctatg

SEQ ID NO: 242 - RNA, 21 nt, synthetic construct
  source 1..21: mol_type = other RNA
  modified_base 1: mod_base = OTHER; note = 2'-fluoro nucleoside with phosphorothioate bond
  modified_base 2: mod_base = OTHER; note = 2'-O-methoxy nucleoside with phosphorothioate bond
  modified_base 3: mod_base = OTHER; note = 2'-fluoro nucleoside
  modified_base 4: mod_base = OTHER; note = 2'-O-methoxy nucleoside
  modified_base 5: mod_base = OTHER; note = 2'-fluoro nucleoside
  modified_base 6: mod_base = OTHER; note = 2'-O-methoxy nucleoside
  modified_base 7: mod_base = OTHER; note = 2'-fluoro nucleoside
  modified_base 8: mod_base = OTHER; note = 2'-O-methoxy nucleoside
  modified_base 9: mod_base = OTHER; note = 2'-fluoro nucleoside
  modified_base 10: mod_base = OTHER; note = 2'-O-methoxy nucleoside
  modified_base 11: mod_base = OTHER; note = 2'-fluoro nucleoside
  modified_base 12: mod_base = OTHER; note = 2'-O-methoxy nucleoside
  modified_base 13: mod_base = OTHER; note = 2'-fluoro nucleoside
  modified_base 14: mod_base = OTHER; note = 2'-O-methoxy nucleoside
  modified_base 15: mod_base = OTHER; note = 2'-fluoro nucleoside
  modified_base 16: mod_base = OTHER; note = 2'-O-methoxy nucleoside
  modified_base 17: mod_base = OTHER; note = 2'-fluoro nucleoside
  modified_base 18: mod_base = OTHER; note = 2'-O-methoxy nucleoside
  modified_base 19: mod_base = OTHER; note = 2'-fluoro nucleoside
  modified_base 20: mod_base = OTHER; note = 2'-O-methoxy nucleoside
  modified_base 21: mod_base = OTHER; note = 2'-fluoro nucleoside
ctttactctgctctatgccag

SEQ ID NO: 243 - RNA, 21 nt, synthetic construct
  source 1..21: mol_type = other RNA
  modified_base 1: mod_base = OTHER; note = 2'-fluoro nucleoside with phosphorothioate bond
  modified_base 2: mod_base = OTHER; note = 2'-O-methoxy nucleoside with phosphorothioate bond
  modified_base 3: mod_base = OTHER; note = 2'-fluoro nucleoside
  modified_base 4: mod_base = OTHER; note = 2'-O-methoxy nucleoside
  modified_base 5: mod_base = OTHER; note = 2'-fluoro nucleoside
  modified_base 6: mod_base = OTHER; note = 2'-O-methoxy nucleoside
  modified_base 7: mod_base = OTHER; note = 2'-fluoro nucleoside
  modified_base 8: mod_base = OTHER; note = 2'-O-methoxy nucleoside
  modified_base 9: mod_base = OTHER; note = 2'-fluoro nucleoside
  modified_base 10: mod_base = OTHER; note = 2'-O-methoxy nucleoside
  modified_base 11: mod_base = OTHER; note = 2'-fluoro nucleoside
  modified_base 12: mod_base = OTHER; note = 2'-O-methoxy nucleoside
  modified_base 13: mod_base = OTHER; note = 2'-fluoro nucleoside
  modified_base 14: mod_base = OTHER; note = 2'-O-methoxy nucleoside
  modified_base 15: mod_base = OTHER; note = 2'-fluoro nucleoside
  modified_base 16: mod_base = OTHER; note = 2'-O-methoxy nucleoside
  modified_base 17: mod_base = OTHER; note = 2'-fluoro nucleoside
  modified_base 18: mod_base = OTHER; note = 2'-O-methoxy nucleoside
  modified_base 19: mod_base = OTHER; note = 2'-fluoro nucleoside
  modified_base 20: mod_base = OTHER; note = 2'-O-methoxy nucleoside
  modified_base 21: mod_base = OTHER; note = 2'-fluoro nucleoside
gctgtgctagcaacacccaaa

SEQ ID NO: 244 - RNA, 21 nt, synthetic construct
  source 1..21: mol_type = other RNA
  modified_base 1: mod_base = OTHER; note = 2'-fluoro nucleoside with phosphorothioate bond
  modified_base 2: mod_base = OTHER; note = 2'-O-methoxy nucleoside with phosphorothioate bond
  modified_base 3: mod_base = OTHER; note = 2'-fluoro nucleoside
  modified_base 4: mod_base = OTHER; note = 2'-O-methoxy nucleoside
  modified_base 5: mod_base = OTHER; note = 2'-fluoro nucleoside
  modified_base 6: mod_base = OTHER; note = 2'-O-methoxy nucleoside
  modified_base 7: mod_base = OTHER; note = 2'-fluoro nucleoside
  modified_base 8: mod_base = OTHER; note = 2'-O-methoxy nucleoside
  modified_base 9: mod_base = OTHER; note = 2'-fluoro nucleoside
  modified_base 10: mod_base = OTHER; note = 2'-O-methoxy nucleoside
  modified_base 11: mod_base = OTHER; note = 2'-fluoro nucleoside
  modified_base 12: mod_base = OTHER; note = 2'-O-methoxy nucleoside
  modified_base 13: mod_base = OTHER; note = 2'-fluoro nucleoside
  modified_base 14: mod_base = OTHER; note = 2'-O-methoxy nucleoside
  modified_base 15: mod_base = OTHER; note = 2'-fluoro nucleoside
  modified_base 16: mod_base = OTHER; note = 2'-O-methoxy nucleoside
  modified_base 17: mod_base = OTHER; note = 2'-fluoro nucleoside
  modified_base 18: mod_base = OTHER; note = 2'-O-methoxy nucleoside
  modified_base 19: mod_base = OTHER; note = 2'-fluoro nucleoside
  modified_base 20: mod_base = OTHER; note = 2'-O-methoxy nucleoside
  modified_base 21: mod_base = OTHER; note = 2'-fluoro nucleoside
tcacctaggactgactcggca

SEQ ID NO: 245 - RNA, 21 nt, synthetic construct
  source 1..21: mol_type = other RNA
  modified_base 1: mod_base = OTHER; note = 2'-fluoro nucleoside with phosphorothioate bond
  modified_base 2: mod_base = OTHER; note = 2'-O-methoxy nucleoside with phosphorothioate bond
  modified_base 3: mod_base = OTHER; note = 2'-fluoro nucleoside
  modified_base 4: mod_base = OTHER; note = 2'-O-methoxy nucleoside
  modified_base 5: mod_base = OTHER; note = 2'-fluoro nucleoside
  modified_base 6: mod_base = OTHER; note = 2'-O-methoxy nucleoside
  modified_base 7: mod_base = OTHER; note = 2'-fluoro nucleoside
  modified_base 8: mod_base = OTHER; note = 2'-O-methoxy nucleoside
  modified_base 9: mod_base = OTHER; note = 2'-fluoro nucleoside
  modified_base 10: mod_base = OTHER; note = 2'-O-methoxy nucleoside
  modified_base 11: mod_base = OTHER; note = 2'-fluoro nucleoside
  modified_base 12: mod_base = OTHER; note = 2'-O-methoxy nucleoside
  modified_base 13: mod_base = OTHER; note = 2'-fluoro nucleoside
  modified_base 14: mod_base = OTHER; note = 2'-O-methoxy nucleoside
  modified_base 15: mod_base = OTHER; note = 2'-fluoro nucleoside
  modified_base 16: mod_base = OTHER; note = 2'-O-methoxy nucleoside
  modified_base 17: mod_base = OTHER; note = 2'-fluoro nucleoside
  modified_base 18: mod_base = OTHER; note = 2'-O-methoxy nucleoside
  modified_base 19: mod_base = OTHER; note = 2'-fluoro nucleoside
  modified_base 20: mod_base = OTHER; note = 2'-O-methoxy nucleoside
  modified_base 21: mod_base = OTHER; note = 2'-fluoro nucleoside
actgactcggcagtgtgcagt

SEQ ID NO: 246 - RNA, 21 nt, synthetic construct
  source 1..21: mol_type = other RNA
  modified_base 1: mod_base = OTHER; note = 2'-fluoro nucleoside with phosphorothioate bond
  modified_base 2: mod_base = OTHER; note = 2'-O-methoxy nucleoside with phosphorothioate bond
  modified_base 3: mod_base = OTHER; note = 2'-fluoro nucleoside
  modified_base 4: mod_base = OTHER; note = 2'-O-methoxy nucleoside
  modified_base 5: mod_base = OTHER; note = 2'-fluoro nucleoside
  modified_base 6: mod_base = OTHER; note = 2'-O-methoxy nucleoside
  modified_base 7: mod_base = OTHER; note = 2'-fluoro nucleoside
  modified_base 8: mod_base = OTHER; note = 2'-O-methoxy nucleoside
  modified_base 9: mod_base = OTHER; note = 2'-fluoro nucleoside
  modified_base 10: mod_base = OTHER; note = 2'-O-methoxy nucleoside
  modified_base 11: mod_base = OTHER; note = 2'-fluoro nucleoside
  modified_base 12: mod_base = OTHER; note = 2'-O-methoxy nucleoside
  modified_base 13: mod_base = OTHER; note = 2'-fluoro nucleoside
  modified_base 14: mod_base = OTHER; note = 2'-O-methoxy nucleoside
  modified_base 15: mod_base = OTHER; note = 2'-fluoro nucleoside
  modified_base 16: mod_base = OTHER; note = 2'-O-methoxy nucleoside
  modified_base 17: mod_base = OTHER; note = 2'-fluoro nucleoside
  modified_base 18: mod_base = OTHER; note = 2'-O-methoxy nucleoside
  modified_base 19: mod_base = OTHER; note = 2'-fluoro nucleoside
  modified_base 20: mod_base = OTHER; note = 2'-O-methoxy nucleoside
  modified_base 21: mod_base = OTHER; note = 2'-fluoro nucleoside
tcggcagtgtgcagtggtgca

SEQ ID NO: 247 - RNA, 21 nt, synthetic construct
  source 1..21: mol_type = other RNA
  modified_base 1: mod_base = OTHER; note = 2'-fluoro nucleoside with phosphorothioate bond
  modified_base 2: mod_base = OTHER; note = 2'-O-methoxy nucleoside with phosphorothioate bond
  modified_base 3: mod_base = OTHER; note = 2'-fluoro nucleoside
  modified_base 4: mod_base = OTHER; note = 2'-O-methoxy nucleoside
  modified_base 5: mod_base = OTHER; note = 2'-fluoro nucleoside
  modified_base 6: mod_base = OTHER; note = 2'-O-methoxy nucleoside
  modified_base 7: mod_base = OTHER; note = 2'-fluoro nucleoside
  modified_base 8: mod_base = OTHER; note = 2'-O-methoxy nucleoside
  modified_base 9: mod_base = OTHER; note = 2'-fluoro nucleoside
  modified_base 10: mod_base = OTHER; note = 2'-O-methoxy nucleoside
  modified_base 11: mod_base = OTHER; note = 2'-fluoro nucleoside
  modified_base 12: mod_base = OTHER; note = 2'-O-methoxy nucleoside
  modified_base 13: mod_base = OTHER; note = 2'-fluoro nucleoside
  modified_base 14: mod_base = OTHER; note = 2'-O-methoxy nucleoside
  modified_base 15: mod_base = OTHER; note = 2'-fluoro nucleoside
  modified_base 16: mod_base = OTHER; note = 2'-O-methoxy nucleoside
  modified_base 17: mod_base = OTHER; note = 2'-fluoro nucleoside
  modified_base 18: mod_base = OTHER; note = 2'-O-methoxy nucleoside
  modified_base 19: mod_base = OTHER; note = 2'-fluoro nucleoside
  modified_base 20: mod_base = OTHER; note = 2'-O-methoxy nucleoside
  modified_base 21: mod_base = OTHER; note = 2'-fluoro nucleoside
ggcagtgtgcagtggtgcatg

SEQ ID NO: 248 - RNA, 21 nt, synthetic construct
  source 1..21: mol_type = other RNA
  modified_base 1: mod_base = OTHER; note = 2'-fluoro nucleoside with phosphorothioate bond
  modified_base 2: mod_base = OTHER; note = 2'-O-methoxy nucleoside with phosphorothioate bond
  modified_base 3: mod_base = OTHER; note = 2'-fluoro nucleoside
  modified_base 4: mod_base = OTHER; note = 2'-O-methoxy nucleoside
  modified_base 5: mod_base = OTHER; note = 2'-fluoro nucleoside
  modified_base 6: mod_base = OTHER; note = 2'-O-methoxy nucleoside
  modified_base 7: mod_base = OTHER; note = 2'-fluoro nucleoside
  modified_base 8: mod_base = OTHER; note = 2'-O-methoxy nucleoside
  modified_base 9: mod_base = OTHER; note = 2'-fluoro nucleoside
  modified_base 10: mod_base = OTHER; note = 2'-O-methoxy nucleoside
  modified_base 11: mod_base = OTHER; note = 2'-fluoro nucleoside
  modified_base 12: mod_base = OTHER; note = 2'-O-methoxy nucleoside
  modified_base 13: mod_base = OTHER; note = 2'-fluoro nucleoside
  modified_base 14: mod_base = OTHER; note = 2'-O-methoxy nucleoside
  modified_base 15: mod_base = OTHER; note = 2'-fluoro nucleoside
  modified_base 16: mod_base = OTHER; note = 2'-O-methoxy nucleoside
  modified_base 17: mod_base = OTHER; note = 2'-fluoro nucleoside
  modified_base 18: mod_base = OTHER; note = 2'-O-methoxy nucleoside
  modified_base 19: mod_base = OTHER; note = 2'-fluoro nucleoside
  modified_base 20: mod_base = OTHER; note = 2'-O-methoxy nucleoside
  modified_base 21: mod_base = OTHER; note = 2'-fluoro nucleoside
gcagtggtgcatgcactgtct

SEQ ID NO: 249 - RNA, 21 nt, synthetic construct
  source 1..21: mol_type = other RNA
  modified_base 1: mod_base = OTHER; note = 2'-fluoro nucleoside with phosphorothioate bond
  modified_base 2: mod_base = OTHER; note = 2'-O-methoxy nucleoside with phosphorothioate bond
  modified_base 3: mod_base = OTHER; note = 2'-fluoro nucleoside
  modified_base 4: mod_base = OTHER; note = 2'-O-methoxy nucleoside
  modified_base 5: mod_base = OTHER; note = 2'-fluoro nucleoside
  modified_base 6: mod_base = OTHER; note = 2'-O-methoxy nucleoside
  modified_base 7: mod_base = OTHER; note = 2'-fluoro nucleoside
  modified_base 8: mod_base = OTHER; note = 2'-O-methoxy nucleoside
  modified_base 9: mod_base = OTHER; note = 2'-fluoro nucleoside
  modified_base 10: mod_base = OTHER; note = 2'-O-methoxy nucleoside
  modified_base 11: mod_base = OTHER; note = 2'-fluoro nucleoside
  modified_base 12: mod_base = OTHER; note = 2'-O-methoxy nucleoside
  modified_base 13: mod_base = OTHER; note = 2'-fluoro nucleoside
  modified_base 14: mod_base = OTHER; note = 2'-O-methoxy nucleoside
  modified_base 15: mod_base = OTHER; note = 2'-fluoro nucleoside
  modified_base 16: mod_base = OTHER; note = 2'-O-methoxy nucleoside
  modified_base 17: mod_base = OTHER; note = 2'-fluoro nucleoside
  modified_base 18: mod_base = OTHER; note = 2'-O-methoxy nucleoside
  modified_base 19: mod_base = OTHER; note = 2'-fluoro nucleoside
  modified_base 20: mod_base = OTHER; note = 2'-O-methoxy nucleoside
  modified_base 21: mod_base = OTHER; note = 2'-fluoro nucleoside
gtgcatgcactgtctcagcca

SEQ ID NO: 250 - RNA, 21 nt, synthetic construct
  source 1..21: mol_type = other RNA
  modified_base 1: mod_base = OTHER; note = 2'-fluoro nucleoside with phosphorothioate bond
  modified_base 2: mod_base = OTHER; note = 2'-O-methoxy nucleoside with phosphorothioate bond
  modified_base 3: mod_base = OTHER; note = 2'-fluoro nucleoside
  modified_base 4: mod_base = OTHER; note = 2'-O-methoxy nucleoside
  modified_base 5: mod_base = OTHER; note = 2'-fluoro nucleoside
  modified_base 6: mod_base = OTHER; note = 2'-O-methoxy nucleoside
  modified_base 7: mod_base = OTHER; note = 2'-fluoro nucleoside
  modified_base 8: mod_base = OTHER; note = 2'-O-methoxy nucleoside
  modified_base 9: mod_base = OTHER; note = 2'-fluoro nucleoside
  modified_base 10: mod_base = OTHER; note = 2'-O-methoxy nucleoside
  modified_base 11: mod_base = OTHER; note = 2'-fluoro nucleoside
  modified_base 12: mod_base = OTHER; note = 2'-O-methoxy nucleoside
  modified_base 13: mod_base = OTHER; note = 2'-fluoro nucleoside
  modified_base 14: mod_base = OTHER; note = 2'-O-methoxy nucleoside
  modified_base 15: mod_base = OTHER; note = 2'-fluoro nucleoside
  modified_base 16: mod_base = OTHER; note = 2'-O-methoxy nucleoside
  modified_base 17: mod_base = OTHER; note = 2'-fluoro nucleoside
  modified_base 18: mod_base = OTHER; note = 2'-O-methoxy nucleoside
  modified_base 19: mod_base = OTHER; note = 2'-fluoro nucleoside
  modified_base 20: mod_base = OTHER; note = 2'-O-methoxy nucleoside
  modified_base 21: mod_base = OTHER; note = 2'-fluoro nucleoside
aacccgctccactacccggca

SEQ ID NO: 251 - RNA, 21 nt, synthetic construct
  source 1..21: mol_type = other RNA
  modified_base 1: mod_base = OTHER; note = 2'-fluoro nucleoside with phosphorothioate bond
  modified_base 2: mod_base = OTHER; note = 2'-O-methoxy nucleoside with phosphorothioate bond
  modified_base 3: mod_base = OTHER; note = 2'-fluoro nucleoside
  modified_base 4: mod_base = OTHER; note = 2'-O-methoxy nucleoside
  modified_base 5: mod_base = OTHER; note = 2'-fluoro nucleoside
  modified_base 6: mod_base = OTHER; note = 2'-O-methoxy nucleoside
  modified_base 7: mod_base = OTHER; note = 2'-fluoro nucleoside
  modified_base 8: mod_base = OTHER; note = 2'-O-methoxy nucleoside
  modified_base 9: mod_base = OTHER; note = 2'-fluoro nucleoside
  modified_base 10: mod_base = OTHER; note = 2'-O-methoxy nucleoside
  modified_base 11: mod_base = OTHER; note = 2'-fluoro nucleoside
  modified_base 12: mod_base = OTHER; note = 2'-O-methoxy nucleoside
  modified_base 13: mod_base = OTHER; note = 2'-fluoro nucleoside
  modified_base 14: mod_base = OTHER; note = 2'-O-methoxy nucleoside
  modified_base 15: mod_base = OTHER; note = 2'-fluoro nucleoside
  modified_base 16: mod_base = OTHER; note = 2'-O-methoxy nucleoside
  modified_base 17: mod_base = OTHER; note = 2'-fluoro nucleoside
  modified_base 18: mod_base = OTHER; note = 2'-O-methoxy nucleoside
  modified_base 19: mod_base = OTHER; note = 2'-fluoro nucleoside
  modified_base 20: mod_base = OTHER; note = 2'-O-methoxy nucleoside
  modified_base 21: mod_base = OTHER; note = 2'-fluoro nucleoside
actacccggcagggtacacat

SEQ ID NO: 252 - RNA, 21 nt, synthetic construct
  source 1..21: mol_type = other RNA
  modified_base 1: mod_base = OTHER; note = 2'-fluoro nucleoside with phosphorothioate bond
  modified_base 2: mod_base = OTHER; note = 2'-O-methoxy nucleoside with phosphorothioate bond
  modified_base 3: mod_base = OTHER; note = 2'-fluoro nucleoside
  modified_base 4: mod_base = OTHER; note = 2'-O-methoxy nucleoside
  modified_base 5: mod_base = OTHER; note = 2'-fluoro nucleoside
  modified_base 6: mod_base = OTHER; note = 2'-O-methoxy nucleoside
  modified_base 7: mod_base = OTHER; note = 2'-fluoro nucleoside
  modified_base 8: mod_base = OTHER; note = 2'-O-methoxy nucleoside
  modified_base 9: mod_base = OTHER; note = 2'-fluoro nucleoside
  modified_base 10: mod_base = OTHER; note = 2'-O-methoxy nucleoside
  modified_base 11: mod_base = OTHER; note = 2'-fluoro nucleoside
  modified_base 12: mod_base = OTHER; note = 2'-O-methoxy nucleoside
  modified_base 13: mod_base = OTHER; note = 2'-fluoro nucleoside
  modified_base 14: mod_base = OTHER; note = 2'-O-methoxy nucleoside
  modified_base 15: mod_base = OTHER; note = 2'-fluoro nucleoside
  modified_base 16: mod_base = OTHER; note = 2'-O-methoxy nucleoside
  modified_base 17: mod_base = OTHER; note = 2'-fluoro nucleoside
  modified_base 18: mod_base = OTHER; note = 2'-O-methoxy nucleoside
  modified_base 19: mod_base = OTHER; note = 2'-fluoro nucleoside
  modified_base 20: mod_base = OTHER; note = 2'-O-methoxy nucleoside
  modified_base 21: mod_base = OTHER; note = 2'-fluoro nucleoside
cctacttcacagaggaagaaa

SEQ ID NO: 253 - RNA, 21 nt, synthetic construct
  source 1..21: mol_type = other RNA
  modified_base 1: mod_base = OTHER; note = 2'-fluoro nucleoside with phosphorothioate bond
  modified_base 2: mod_base = OTHER; note = 2'-O-methoxy nucleoside with phosphorothioate bond
  modified_base 3: mod_base = OTHER; note = 2'-fluoro nucleoside
  modified_base 4: mod_base = OTHER; note = 2'-O-methoxy nucleoside
  modified_base 5: mod_base = OTHER; note = 2'-fluoro nucleoside
  modified_base 6: mod_base = OTHER; note = 2'-O-methoxy nucleoside
  modified_base 7: mod_base = OTHER; note = 2'-fluoro nucleoside
  modified_base 8: mod_base = OTHER; note = 2'-O-methoxy nucleoside
  modified_base 9: mod_base = OTHER; note = 2'-fluoro nucleoside
  modified_base 10: mod_base = OTHER; note = 2'-O-methoxy nucleoside
  modified_base 11: mod_base = OTHER; note = 2'-fluoro nucleoside
  modified_base 12: mod_base = OTHER; note = 2'-O-methoxy nucleoside
  modified_base 13: mod_base = OTHER; note = 2'-fluoro nucleoside
  modified_base 14: mod_base = OTHER; note = 2'-O-methoxy nucleoside
  modified_base 15: mod_base = OTHER; note = 2'-fluoro nucleoside
  modified_base 16: mod_base = OTHER; note = 2'-O-methoxy nucleoside
  modified_base 17: mod_base = OTHER; note = 2'-fluoro nucleoside
  modified_base 18: mod_base = OTHER; note = 2'-O-methoxy nucleoside
  modified_base 19: mod_base = OTHER; note = 2'-fluoro nucleoside
  modified_base 20: mod_base = OTHER; note = 2'-O-methoxy nucleoside
  modified_base 21: mod_base = OTHER; note = 2'-fluoro nucleoside
ccaggaagctcggtgagtgat

SEQ ID NO: 254 - RNA, 21 nt, synthetic construct
  source 1..21: mol_type = other RNA
  modified_base 1: mod_base = OTHER; note = 2'-fluoro nucleoside with phosphorothioate bond
  modified_base 2: mod_base = OTHER; note = 2'-O-methoxy nucleoside with phosphorothioate bond
  modified_base 3: mod_base = OTHER; note = 2'-fluoro nucleoside
  modified_base 4: mod_base = OTHER; note = 2'-O-methoxy nucleoside
  modified_base 5: mod_base = OTHER; note = 2'-fluoro nucleoside
  modified_base 6: mod_base = OTHER; note = 2'-O-methoxy nucleoside
  modified_base 7: mod_base = OTHER; note = 2'-fluoro nucleoside
  modified_base 8: mod_base = OTHER; note = 2'-O-methoxy nucleoside
  modified_base 9: mod_base = OTHER; note = 2'-fluoro nucleoside
  modified_base 10: mod_base = OTHER; note = 2'-O-methoxy nucleoside
  modified_base 11: mod_base = OTHER; note = 2'-fluoro nucleoside
  modified_base 12: mod_base = OTHER; note = 2'-O-methoxy nucleoside
  modified_base 13: mod_base = OTHER; note = 2'-fluoro nucleoside
  modified_base 14: mod_base = OTHER; note = 2'-O-methoxy nucleoside
  modified_base 15: mod_base = OTHER; note = 2'-fluoro nucleoside
  modified_base 16: mod_base = OTHER; note = 2'-O-methoxy nucleoside
  modified_base 17: mod_base = OTHER; note = 2'-fluoro nucleoside
  modified_base 18: mod_base = OTHER; note = 2'-O-methoxy nucleoside
  modified_base 19: mod_base = OTHER; note = 2'-fluoro nucleoside
  modified_base 20: mod_base = OTHER; note = 2'-O-methoxy nucleoside
  modified_base 21: mod_base = OTHER; note = 2'-fluoro nucleoside
agaacgatgcctgcaggcatg

SEQ ID NO: 255 - RNA, 21 nt, synthetic construct
  source 1..21: mol_type = other RNA
  modified_base 1: mod_base = OTHER; note = 2'-fluoro nucleoside with phosphorothioate bond
  modified_base 2: mod_base = OTHER; note = 2'-O-methoxy nucleoside with phosphorothioate bond
  modified_base 3: mod_base = OTHER; note = 2'-fluoro nucleoside
  modified_base 4: mod_base = OTHER; note = 2'-O-methoxy nucleoside
  modified_base 5: mod_base = OTHER; note = 2'-fluoro nucleoside
  modified_base 6: mod_base = OTHER; note = 2'-O-methoxy nucleoside
  modified_base 7: mod_base = OTHER; note = 2'-fluoro nucleoside
  modified_base 8: mod_base = OTHER; note = 2'-O-methoxy nucleoside
  modified_base 9: mod_base = OTHER; note = 2'-fluoro nucleoside
  modified_base 10: mod_base = OTHER; note = 2'-O-methoxy nucleoside
  modified_base 11: mod_base = OTHER; note = 2'-fluoro nucleoside
  modified_base 12: mod_base = OTHER; note = 2'-O-methoxy nucleoside
  modified_base 13: mod_base = OTHER; note = 2'-fluoro nucleoside
  modified_base 14: mod_base = OTHER; note = 2'-O-methoxy nucleoside
  modified_base 15: mod_base = OTHER; note = 2'-fluoro nucleoside
  modified_base 16: mod_base = OTHER; note = 2'-O-methoxy nucleoside
  modified_base 17: mod_base = OTHER; note = 2'-fluoro nucleoside
  modified_base 18: mod_base = OTHER; note = 2'-O-methoxy nucleoside
  modified_base 19: mod_base = OTHER; note = 2'-fluoro nucleoside
  modified_base 20: mod_base = OTHER; note = 2'-O-methoxy nucleoside
  modified_base 21: mod_base = OTHER; note = 2'-fluoro nucleoside
tgcctgcaggcatggaacttt

SEQ ID NO: 256 - RNA, 21 nt, synthetic construct
  source 1..21: mol_type = other RNA
  modified_base 1: mod_base = OTHER; note = 2'-fluoro nucleoside with phosphorothioate bond
  modified_base 2: mod_base = OTHER; note = 2'-O-methoxy nucleoside with phosphorothioate bond
  modified_base 3: mod_base = OTHER; note = 2'-fluoro nucleoside
  modified_base 4: mod_base = OTHER; note = 2'-O-methoxy nucleoside
  modified_base 5: mod_base = OTHER; note = 2'-fluoro nucleoside
  modified_base 6: mod_base = OTHER; note = 2'-O-methoxy nucleoside
  modified_base 7: mod_base = OTHER; note = 2'-fluoro nucleoside
  modified_base 8: mod_base = OTHER; note = 2'-O-methoxy nucleoside
  modified_base 9: mod_base = OTHER; note = 2'-fluoro nucleoside
  modified_base 10: mod_base = OTHER; note = 2'-O-methoxy nucleoside
  modified_base 11: mod_base = OTHER; note = 2'-fluoro nucleoside
  modified_base 12: mod_base = OTHER; note = 2'-O-methoxy nucleoside
  modified_base 13: mod_base = OTHER; note = 2'-fluoro nucleoside
  modified_base 14: mod_base = OTHER; note = 2'-O-methoxy nucleoside
  modified_base 15: mod_base = OTHER; note = 2'-fluoro nucleoside
  modified_base 16: mod_base = OTHER; note = 2'-O-methoxy nucleoside
  modified_base 17: mod_base = OTHER; note = 2'-fluoro nucleoside
  modified_base 18: mod_base = OTHER; note = 2'-O-methoxy nucleoside
  modified_base 19: mod_base = OTHER; note = 2'-fluoro nucleoside
  modified_base 20: mod_base = OTHER; note = 2'-O-methoxy nucleoside
  modified_base 21: mod_base = OTHER; note = 2'-fluoro nucleoside
cgttatcacccaggcctgatt

SEQ ID NO: 257 - RNA, 21 nt, synthetic construct
  source 1..21: mol_type = other RNA
  modified_base 1: mod_base = OTHER; note = 2'-fluoro nucleoside with phosphorothioate bond
  modified_base 2: mod_base = OTHER; note = 2'-O-methoxy nucleoside with phosphorothioate bond
  modified_base 3: mod_base = OTHER; note = 2'-fluoro nucleoside
  modified_base 4: mod_base = OTHER; note = 2'-O-methoxy nucleoside
  modified_base 5: mod_base = OTHER; note = 2'-fluoro nucleoside
  modified_base 6: mod_base = OTHER; note = 2'-O-methoxy nucleoside
  modified_base 7: mod_base = OTHER; note = 2'-fluoro nucleoside
  modified_base 8: mod_base = OTHER; note = 2'-O-methoxy nucleoside
  modified_base 9: mod_base = OTHER; note = 2'-fluoro nucleoside
  modified_base 10: mod_base = OTHER; note = 2'-O-methoxy nucleoside
  modified_base 11: mod_base = OTHER; note = 2'-fluoro nucleoside
  modified_base 12: mod_base = OTHER; note = 2'-O-methoxy nucleoside
  modified_base 13: mod_base = OTHER; note = 2'-fluoro nucleoside
  modified_base 14: mod_base = OTHER; note = 2'-O-methoxy nucleoside
  modified_base 15: mod_base = OTHER; note = 2'-fluoro nucleoside
  modified_base 16: mod_base = OTHER; note = 2'-O-methoxy nucleoside
  modified_base 17: mod_base = OTHER; note = 2'-fluoro nucleoside
  modified_base 18: mod_base = OTHER; note = 2'-O-methoxy nucleoside
  modified_base 19: mod_base = OTHER; note = 2'-fluoro nucleoside
  modified_base 20: mod_base = OTHER; note = 2'-O-methoxy nucleoside
  modified_base 21: mod_base = OTHER; note = 2'-fluoro nucleoside
cacccaggcctgattcactgg

SEQ ID NO: 258 - RNA, 21 nt, synthetic construct
  source 1..21: mol_type = other RNA
  modified_base 1: mod_base = OTHER; note = 2'-fluoro nucleoside with phosphorothioate bond
  modified_base 2: mod_base = OTHER; note = 2'-O-methoxy nucleoside with phosphorothioate bond
  modified_base 3: mod_base = OTHER; note = 2'-fluoro nucleoside
  modified_base 4: mod_base = OTHER; note = 2'-O-methoxy nucleoside
  modified_base 5: mod_base = OTHER; note = 2'-fluoro nucleoside
  modified_base 6: mod_base = OTHER; note = 2'-O-methoxy nucleoside
  modified_base 7: mod_base = OTHER; note = 2'-fluoro nucleoside
  modified_base 8: mod_base = OTHER; note = 2'-O-methoxy nucleoside
  modified_base 9: mod_base = OTHER; note = 2'-fluoro nucleoside
  modified_base 10: mod_base = OTHER; note = 2'-O-methoxy nucleoside
  modified_base 11: mod_base = OTHER; note = 2'-fluoro nucleoside
  modified_base 12: mod_base = OTHER; note = 2'-O-methoxy nucleoside
  modified_base 13: mod_base = OTHER; note = 2'-fluoro nucleoside
  modified_base 14: mod_base = OTHER; note = 2'-O-methoxy nucleoside
  modified_base 15: mod_base = OTHER; note = 2'-fluoro nucleoside
  modified_base 16: mod_base = OTHER; note = 2'-O-methoxy nucleoside
  modified_base 17: mod_base = OTHER; note = 2'-fluoro nucleoside
  modified_base 18: mod_base = OTHER; note = 2'-O-methoxy nucleoside
  modified_base 19: mod_base = OTHER; note = 2'-fluoro nucleoside
  modified_base 20: mod_base = OTHER; note = 2'-O-methoxy nucleoside
  modified_base 21: mod_base = OTHER; note = 2'-fluoro nucleoside
cggagatgcttctaaggcatg

SEQ ID NO: 259 - RNA, 21 nt, synthetic construct
  source 1..21: mol_type = other RNA
  modified_base 1: mod_base = OTHER; note = 2'-fluoro nucleoside with phosphorothioate bond
  modified_base 2: mod_base = OTHER; note = 2'-O-methoxy nucleoside with phosphorothioate bond
  modified_base 3: mod_base = OTHER; note = 2'-fluoro nucleoside
  modified_base 4: mod_base = OTHER; note = 2'-O-methoxy nucleoside
  modified_base 5: mod_base = OTHER; note = 2'-fluoro nucleoside
  modified_base 6: mod_base = OTHER; note = 2'-O-methoxy nucleoside
  modified_base 7: mod_base = OTHER; note = 2'-fluoro nucleoside
  modified_base 8: mod_base = OTHER; note = 2'-O-methoxy nucleoside
  modified_base 9: mod_base = OTHER; note = 2'-fluoro nucleoside
  modified_base 10: mod_base = OTHER; note = 2'-O-methoxy nucleoside
  modified_base 11: mod_base = OTHER; note = 2'-fluoro nucleoside
  modified_base 12: mod_base = OTHER; note = 2'-O-methoxy nucleoside
  modified_base 13: mod_base = OTHER; note = 2'-fluoro nucleoside
  modified_base 14: mod_base = OTHER; note = 2'-O-methoxy nucleoside
  modified_base 15: mod_base = OTHER; note = 2'-fluoro nucleoside
  modified_base 16: mod_base = OTHER; note = 2'-O-methoxy nucleoside
  modified_base 17: mod_base = OTHER; note = 2'-fluoro nucleoside
  modified_base 18: mod_base = OTHER; note = 2'-O-methoxy nucleoside
  modified_base 19: mod_base = OTHER; note = 2'-fluoro nucleoside
  modified_base 20: mod_base = OTHER; note = 2'-O-methoxy nucleoside
  modified_base 21: mod_base = OTHER; note = 2'-fluoro nucleoside
agatgcttctaaggcatggtc

SEQ ID NO: 260 - RNA, 21 nt, synthetic construct
  source 1..21: mol_type = other RNA
  modified_base 1: mod_base = OTHER; note = 2'-fluoro nucleoside with phosphorothioate bond
  modified_base 2: mod_base = OTHER; note = 2'-O-methoxy nucleoside with phosphorothioate bond
  modified_base 3: mod_base = OTHER; note = 2'-fluoro nucleoside
  modified_base 4: mod_base = OTHER; note = 2'-O-methoxy nucleoside
  modified_base 5: mod_base = OTHER; note = 2'-fluoro nucleoside
  modified_base 6: mod_base = OTHER; note = 2'-O-methoxy nucleoside
  modified_base 7: mod_base = OTHER; note = 2'-fluoro nucleoside
  modified_base 8: mod_base = OTHER; note = 2'-O-methoxy nucleoside
  modified_base 9: mod_base = OTHER; note = 2'-fluoro nucleoside
  modified_base 10: mod_base = OTHER; note = 2'-O-methoxy nucleoside
  modified_base 11: mod_base = OTHER; note = 2'-fluoro nucleoside
  modified_base 12: mod_base = OTHER; note = 2'-O-methoxy nucleoside
  modified_base 13: mod_base = OTHER; note = 2'-fluoro nucleoside
  modified_base 14: mod_base = OTHER; note = 2'-O-methoxy nucleoside
  modified_base 15: mod_base = OTHER; note = 2'-fluoro nucleoside
  modified_base 16: mod_base = OTHER; note = 2'-O-methoxy nucleoside
  modified_base 17: mod_base = OTHER; note = 2'-fluoro nucleoside
  modified_base 18: mod_base = OTHER; note = 2'-O-methoxy nucleoside
  modified_base 19: mod_base = OTHER; note = 2'-fluoro nucleoside
  modified_base 20: mod_base = OTHER; note = 2'-O-methoxy nucleoside
  modified_base 21: mod_base = OTHER; note = 2'-fluoro nucleoside
acaactgtccctccttgagca

SEQ ID NO: 261 - RNA, 21 nt, synthetic construct
  source 1..21: mol_type = other RNA
  modified_base 1: mod_base = OTHER; note = 2'-fluoro nucleoside with phosphorothioate bond
  modified_base 2: mod_base = OTHER; note = 2'-O-methoxy nucleoside with phosphorothioate bond
  modified_base 3: mod_base = OTHER; note = 2'-fluoro nucleoside
  modified_base 4: mod_base = OTHER; note = 2'-O-methoxy nucleoside
  modified_base 5: mod_base = OTHER; note = 2'-fluoro nucleoside
  modified_base 6: mod_base = OTHER; note = 2'-O-methoxy nucleoside
  modified_base 7: mod_base = OTHER; note = 2'-fluoro nucleoside
  modified_base 8: mod_base = OTHER; note = 2'-O-methoxy nucleoside
  modified_base 9: mod_base = OTHER; note = 2'-fluoro nucleoside
  modified_base 10: mod_base = OTHER; note = 2'-O-methoxy nucleoside
  modified_base 11: mod_base = OTHER; note = 2'-fluoro nucleoside
  modified_base 12: mod_base = OTHER; note = 2'-O-methoxy nucleoside
  modified_base 13: mod_base = OTHER; note = 2'-fluoro nucleoside
  modified_base 14: mod_base = OTHER; note = 2'-O-methoxy nucleoside
  modified_base 15: mod_base = OTHER; note = 2'-fluoro nucleoside
  modified_base 16: mod_base = OTHER; note = 2'-O-methoxy nucleoside
  modified_base 17: mod_base = OTHER; note = 2'-fluoro nucleoside
  modified_base 18: mod_base = OTHER; note = 2'-O-methoxy nucleoside
  modified_base 19: mod_base = OTHER; note = 2'-fluoro nucleoside
  modified_base 20: mod_base = OTHER; note = 2'-O-methoxy nucleoside
  modified_base 21: mod_base = OTHER; note = 2'-fluoro nucleoside
cacccaagcaagcagacattt

SEQ ID NO: 262 - RNA, 21 nt, synthetic construct
  source 1..21: mol_type = other RNA
  modified_base 1: mod_base = OTHER; note = 2'-fluoro nucleoside with phosphorothioate bond
  modified_base 2: mod_base = OTHER; note = 2'-O-methoxy nucleoside with phosphorothioate bond
  modified_base 3: mod_base = OTHER; note = 2'-fluoro nucleoside
  modified_base 4: mod_base = OTHER; note = 2'-O-methoxy nucleoside
  modified_base 5: mod_base = OTHER; note = 2'-fluoro nucleoside
  modified_base 6: mod_base = OTHER; note = 2'-O-methoxy nucleoside
  modified_base 7: mod_base = OTHER; note = 2'-fluoro nucleoside
  modified_base 8: mod_base = OTHER; note = 2'-O-methoxy nucleoside
  modified_base 9: mod_base = OTHER; note = 2'-fluoro nucleoside
  modified_base 10: mod_base = OTHER; note = 2'-O-methoxy nucleoside
  modified_base 11: mod_base = OTHER; note = 2'-fluoro nucleoside
  modified_base 12: mod_base = OTHER; note = 2'-O-methoxy nucleoside
  modified_base 13: mod_base = OTHER; note = 2'-fluoro nucleoside
  modified_base 14: mod_base = OTHER; note = 2'-O-methoxy nucleoside
  modified_base 15: mod_base = OTHER; note = 2'-fluoro nucleoside
  modified_base 16: mod_base = OTHER; note = 2'-O-methoxy nucleoside
  modified_base 17: mod_base = OTHER; note = 2'-fluoro nucleoside
  modified_base 18: mod_base = OTHER; note = 2'-O-methoxy nucleoside
  modified_base 19: mod_base = OTHER; note = 2'-fluoro nucleoside
  modified_base 20: mod_base = OTHER; note = 2'-O-methoxy nucleoside
  modified_base 21: mod_base = OTHER; note = 2'-fluoro nucleoside
caagcaagcagacatttatct

SEQ ID NO: 263 - RNA, 21 nt, synthetic construct
  source 1..21: mol_type = other RNA
  modified_base 1: mod_base = OTHER; note = 2'-fluoro nucleoside with phosphorothioate bond
  modified_base 2: mod_base = OTHER; note = 2'-O-methoxy nucleoside with phosphorothioate bond
  modified_base 3: mod_base = OTHER; note = 2'-fluoro nucleoside
  modified_base 4: mod_base = OTHER; note = 2'-O-methoxy nucleoside
  modified_base 5: mod_base = OTHER; note = 2'-fluoro nucleoside
  modified_base 6: mod_base = OTHER; note = 2'-O-methoxy nucleoside
  modified_base 7: mod_base = OTHER; note = 2'-fluoro nucleoside
  modified_base 8: mod_base = OTHER; note = 2'-O-methoxy nucleoside
  modified_base 9: mod_base = OTHER; note = 2'-fluoro nucleoside
  modified_base 10: mod_base = OTHER; note = 2'-O-methoxy nucleoside
  modified_base 11: mod_base = OTHER; note = 2'-fluoro nucleoside
  modified_base 12: mod_base = OTHER; note = 2'-O-methoxy nucleoside
  modified_base 13: mod_base = OTHER; note = 2'-fluoro nucleoside
  modified_base 14: mod_base = OTHER; note = 2'-O-methoxy nucleoside
  modified_base 15: mod_base = OTHER; note = 2'-fluoro nucleoside
  modified_base 16: mod_base = OTHER; note = 2'-O-methoxy nucleoside
  modified_base 17: mod_base = OTHER; note = 2'-fluoro nucleoside
  modified_base 18: mod_base = OTHER; note = 2'-O-methoxy nucleoside
  modified_base 19: mod_base = OTHER; note = 2'-fluoro nucleoside
  modified_base 20: mod_base = OTHER; note = 2'-O-methoxy nucleoside
  modified_base 21: mod_base = OTHER; note = 2'-fluoro nucleoside
tttgggtctgtcctctctgtt

SEQ ID NO: 264 - RNA, 21 nt, synthetic construct
  source 1..21: mol_type = other RNA
  modified_base 1: mod_base = OTHER; note = 2'-fluoro nucleoside with phosphorothioate bond
  modified_base 2: mod_base = OTHER; note = 2'-O-methoxy nucleoside with phosphorothioate bond
  modified_base 3: mod_base = OTHER; note = 2'-fluoro nucleoside
  modified_base 4: mod_base = OTHER; note = 2'-O-methoxy nucleoside
  modified_base 5: mod_base = OTHER; note = 2'-fluoro nucleoside
  modified_base 6: mod_base = OTHER; note = 2'-O-methoxy nucleoside
  modified_base 7: mod_base = OTHER; note = 2'-fluoro nucleoside
  modified_base 8: mod_base = OTHER; note = 2'-O-methoxy nucleoside
  modified_base 9: mod_base = OTHER; note = 2'-fluoro nucleoside
  modified_base 10: mod_base = OTHER; note = 2'-O-methoxy nucleoside
  modified_base 11: mod_base = OTHER; note = 2'-fluoro nucleoside
  modified_base 12: mod_base = OTHER; note = 2'-O-methoxy nucleoside
  modified_base 13: mod_base = OTHER; note = 2'-fluoro nucleoside
  modified_base 14: mod_base = OTHER; note = 2'-O-methoxy nucleoside
  modified_base 15: mod_base = OTHER; note = 2'-fluoro nucleoside
  modified_base 16: mod_base = OTHER; note = 2'-O-methoxy nucleoside
  modified_base 17: mod_base = OTHER; note = 2'-fluoro nucleoside
  modified_base 18: mod_base = OTHER; note = 2'-O-methoxy nucleoside
  modified_base 19: mod_base = OTHER; note = 2'-fluoro nucleoside
  modified_base 20: mod_base = OTHER; note = 2'-O-methoxy nucleoside
  modified_base 21: mod_base = OTHER; note = 2'-fluoro nucleoside
gtctgtcctctctgttgcctt

SEQ ID NO: 265 - RNA, 23 nt, synthetic construct
  source 1..23: mol_type = other RNA
  modified_base 1: mod_base = OTHER; note = 2'-O-methoxy nucleoside with phosphorothioate bond
  modified_base 2: mod_base = OTHER; note = 2'-fluoro nucleoside with phosphorothioate bond
  modified_base 3: mod_base = OTHER; note = 2'-O-methoxy nucleoside
  modified_base 4: mod_base = OTHER; note = 2'-fluoro nucleoside
  modified_base 5: mod_base = OTHER; note = 2'-O-methoxy nucleoside
  modified_base 6: mod_base = OTHER; note = 2'-fluoro nucleoside
  modified_base 7: mod_base = OTHER; note = 2'-O-methoxy nucleoside
  modified_base 8: mod_base = OTHER; note = 2'-fluoro nucleoside
  modified_base 9: mod_base = OTHER; note = 2'-O-methoxy nucleoside
  modified_base 10: mod_base = OTHER; note = 2'-fluoro nucleoside
  modified_base 11: mod_base = OTHER; note = 2'-O-methoxy nucleoside
  modified_base 12: mod_base = OTHER; note = 2'-fluoro nucleoside
  modified_base 13: mod_base = OTHER; note = 2'-O-methoxy nucleoside
  modified_base 14: mod_base = OTHER; note = 2'-fluoro nucleoside
  modified_base 15: mod_base = OTHER; note = 2'-O-methoxy nucleoside
  modified_base 16: mod_base = OTHER; note = 2'-fluoro nucleoside
  modified_base 17: mod_base = OTHER; note = 2'-O-methoxy nucleoside
  modified_base 18: mod_base = OTHER; note = 2'-fluoro nucleoside
  modified_base 19: mod_base = OTHER; note = 2'-O-methoxy nucleoside
  modified_base 20: mod_base = OTHER; note = 2'-fluoro nucleoside
  modified_base 21: mod_base = OTHER; note = 2'-O-methoxy nucleoside with phosphorothioate bond
  modified_base 22: mod_base = OTHER; note = 2'-fluoro nucleoside with phosphorothioate bond
  modified_base 23: mod_base = OTHER; note = 2'-O-methoxy nucleoside
aggatcttggtgaggtatccccg

SEQ ID NO: 266 - RNA, 23 nt, synthetic construct
  source 1..23: mol_type = other RNA
  modified_base 1: mod_base = OTHER; note = 2'-O-methoxy nucleoside with phosphorothioate bond
  modified_base 2: mod_base = OTHER; note = 2'-fluoro nucleoside with phosphorothioate bond
  modified_base 3: mod_base = OTHER; note = 2'-O-methoxy nucleoside
  modified_base 4: mod_base = OTHER; note = 2'-fluoro nucleoside
  modified_base 5: mod_base = OTHER; note = 2'-O-methoxy nucleoside
  modified_base 6: mod_base = OTHER; note = 2'-fluoro nucleoside
  modified_base 7: mod_base = OTHER; note = 2'-O-methoxy nucleoside
  modified_base 8: mod_base = OTHER; note = 2'-fluoro nucleoside
  modified_base 9: mod_base = OTHER; note = 2'-O-methoxy nucleoside
  modified_base 10: mod_base = OTHER; note = 2'-fluoro nucleoside
  modified_base 11: mod_base = OTHER; note = 2'-O-methoxy nucleoside
  modified_base 12: mod_base = OTHER; note = 2'-fluoro nucleoside
  modified_base 13: mod_base = OTHER; note = 2'-O-methoxy nucleoside
  modified_base 14: mod_base = OTHER; note = 2'-fluoro nucleoside
  modified_base 15: mod_base = OTHER; note = 2'-O-methoxy nucleoside
  modified_base 16: mod_base = OTHER; note = 2'-fluoro nucleoside
  modified_base 17: mod_base = OTHER; note = 2'-O-methoxy nucleoside
  modified_base 18: mod_base = OTHER; note = 2'-fluoro nucleoside
  modified_base 19: mod_base = OTHER; note = 2'-O-methoxy nucleoside
  modified_base 20: mod_base = OTHER; note = 2'-fluoro nucleoside
  modified_base 21: mod_base = OTHER; note = 2'-O-methoxy nucleoside with phosphorothioate bond
  modified_base 22: mod_base = OTHER; note = 2'-fluoro nucleoside with phosphorothioate bond
  modified_base 23: mod_base = OTHER; note = 2'-O-methoxy nucleoside
tgcaggatcttggtgaggtatcc

SEQ ID NO: 267 - RNA, 23 nt, synthetic construct
  source 1..23: mol_type = other RNA
  modified_base 1: mod_base = OTHER; note = 2'-O-methoxy nucleoside with phosphorothioate bond
  modified_base 2: mod_base = OTHER; note = 2'-fluoro nucleoside with phosphorothioate bond
  modified_base 3: mod_base = OTHER; note = 2'-O-methoxy nucleoside
  modified_base 4: mod_base = OTHER; note = 2'-fluoro nucleoside
  modified_base 5: mod_base = OTHER; note = 2'-O-methoxy nucleoside
  modified_base 6: mod_base = OTHER; note = 2'-fluoro nucleoside
  modified_base 7: mod_base = OTHER; note = 2'-O-methoxy nucleoside
  modified_base 8: mod_base = OTHER; note = 2'-fluoro nucleoside
  modified_base 9: mod_base = OTHER; note = 2'-O-methoxy nucleoside
  modified_base 10: mod_base = OTHER; note = 2'-fluoro nucleoside
  modified_base 11: mod_base = OTHER; note = 2'-O-methoxy nucleoside
  modified_base 12: mod_base = OTHER; note = 2'-fluoro nucleoside
  modified_base 13: mod_base = OTHER; note = 2'-O-methoxy nucleoside
  modified_base 14: mod_base = OTHER; note = 2'-fluoro nucleoside
  modified_base 15: mod_base = OTHER; note = 2'-O-methoxy nucleoside
  modified_base 16: mod_base = OTHER; note = 2'-fluoro nucleoside
  modified_base 17: mod_base = OTHER; note = 2'-O-methoxy nucleoside
  modified_base 18: mod_base = OTHER; note = 2'-fluoro nucleoside
  modified_base 19: mod_base = OTHER; note = 2'-O-methoxy nucleoside
  modified_base 20: mod_base = OTHER; note = 2'-fluoro nucleoside
  modified_base 21: mod_base = OTHER; note = 2'-O-methoxy nucleoside with phosphorothioate bond
  modified_base 22: mod_base = OTHER; note = 2'-fluoro nucleoside with phosphorothioate bond
  modified_base 23: mod_base = OTHER; note = 2'-O-methoxy nucleoside
tggaagacatgcaggatcttggt

SEQ ID NO: 268 - RNA, 23 nt, synthetic construct
  source 1..23: mol_type = other RNA
  modified_base 1: mod_base = OTHER; note = 2'-O-methoxy nucleoside with phosphorothioate bond
  modified_base 2: mod_base = OTHER; note = 2'-fluoro nucleoside with phosphorothioate bond
  modified_base 3: mod_base = OTHER; note = 2'-O-methoxy nucleoside
  modified_base 4: mod_base = OTHER; note = 2'-fluoro nucleoside
  modified_base 5: mod_base = OTHER; note = 2'-O-methoxy nucleoside
  modified_base 6: mod_base = OTHER; note = 2'-fluoro nucleoside
  modified_base 7: mod_base = OTHER; note = 2'-O-methoxy nucleoside
  modified_base 8: mod_base = OTHER; note = 2'-fluoro nucleoside
  modified_base 9: mod_base = OTHER; note = 2'-O-methoxy nucleoside
  modified_base 10: mod_base = OTHER; note = 2'-fluoro nucleoside
  modified_base 11: mod_base = OTHER; note = 2'-O-methoxy nucleoside
  modified_base 12: mod_base = OTHER; note = 2'-fluoro nucleoside
  modified_base 13: mod_base = OTHER; note = 2'-O-methoxy nucleoside
  modified_base 14: mod_base = OTHER; note = 2'-fluoro nucleoside
  modified_base 15: mod_base = OTHER; note = 2'-O-methoxy nucleoside
  modified_base 16: mod_base = OTHER; note = 2'-fluoro nucleoside
  modified_base 17: mod_base = OTHER; note = 2'-O-methoxy nucleoside
  modified_base 18: mod_base = OTHER; note = 2'-fluoro nucleoside
  modified_base 19: mod_base = OTHER; note = 2'-O-methoxy nucleoside
  modified_base 20: mod_base = OTHER; note = 2'-fluoro nucleoside
  modified_base 21: mod_base = OTHER; note = 2'-O-methoxy nucleoside with phosphorothioate bond
  modified_base 22: mod_base = OTHER; note = 2'-fluoro nucleoside with phosphorothioate bond
  modified_base 23: mod_base = OTHER; note = 2'-O-methoxy nucleoside
actcatcttcaccaggaagccag

SEQ ID NO: 269 - RNA, 23 nt, synthetic construct
  source 1..23: mol_type = other RNA
  modified_base 1: mod_base = OTHER; note = 2'-O-methoxy nucleoside with phosphorothioate bond
  modified_base 2: mod_base = OTHER; note = 2'-fluoro nucleoside with phosphorothioate bond
  modified_base 3: mod_base = OTHER; note = 2'-O-methoxy nucleoside
  modified_base 4: mod_base = OTHER; note = 2'-fluoro nucleoside
  modified_base 5: mod_base = OTHER; note = 2'-O-methoxy nucleoside
  modified_base 6: mod_base = OTHER; note = 2'-fluoro nucleoside
  modified_base 7: mod_base = OTHER; note = 2'-O-methoxy nucleoside
  modified_base 8: mod_base = OTHER; note = 2'-fluoro nucleoside
  modified_base 9: mod_base = OTHER; note = 2'-O-methoxy nucleoside
  modified_base 10: mod_base = OTHER; note = 2'-fluoro nucleoside
  modified_base 11: mod_base = OTHER; note = 2'-O-methoxy nucleoside
  modified_base 12: mod_base = OTHER; note = 2'-fluoro nucleoside
  modified_base 13: mod_base = OTHER; note = 2'-O-methoxy nucleoside
  modified_base 14: mod_base = OTHER; note = 2'-fluoro nucleoside
  modified_base 15: mod_base = OTHER; note = 2'-O-methoxy nucleoside
  modified_base 16: mod_base = OTHER; note = 2'-fluoro nucleoside
  modified_base 17: mod_base = OTHER; note = 2'-O-methoxy nucleoside
  modified_base 18: mod_base = OTHER; note = 2'-fluoro nucleoside
  modified_base 19: mod_base = OTHER; note = 2'-O-methoxy nucleoside
  modified_base 20: mod_base = OTHER; note = 2'-fluoro nucleoside
  modified_base 21: mod_base = OTHER; note = 2'-O-methoxy nucleoside with phosphorothioate bond
  modified_base 22: mod_base = OTHER; note = 2'-fluoro nucleoside with phosphorothioate bond
  modified_base 23: mod_base = OTHER; note = 2'-O-methoxy nucleoside
aacttcaaggccagctccagcag

SEQ ID NO: 270 - RNA, 23 nt, synthetic construct
  source 1..23: mol_type = other RNA
  modified_base 1: mod_base = OTHER; note = 2'-O-methoxy nucleoside with phosphorothioate bond
  modified_base 2: mod_base = OTHER; note = 2'-fluoro nucleoside with phosphorothioate bond
  modified_base 3: mod_base = OTHER; note = 2'-O-methoxy nucleoside
  modified_base 4: mod_base = OTHER; note = 2'-fluoro nucleoside
  modified_base 5: mod_base = OTHER; note = 2'-O-methoxy nucleoside
  modified_base 6: mod_base = OTHER; note = 2'-fluoro nucleoside
  modified_base 7: mod_base = OTHER; note = 2'-O-methoxy nucleoside
  modified_base 8: mod_base = OTHER; note = 2'-fluoro nucleoside
  modified_base 9: mod_base = OTHER; note = 2'-O-methoxy nucleoside
  modified_base 10: mod_base = OTHER; note = 2'-fluoro nucleoside
  modified_base 11: mod_base = OTHER; note = 2'-O-methoxy nucleoside
  modified_base 12: mod_base = OTHER; note = 2'-fluoro nucleoside
  modified_base 13: mod_base = OTHER; note = 2'-O-methoxy nucleoside
  modified_base 14: mod_base = OTHER; note = 2'-fluoro nucleoside
  modified_base 15: mod_base = OTHER; note = 2'-O-methoxy nucleoside
  modified_base 16: mod_base = OTHER; note = 2'-fluoro nucleoside
  modified_base 17: mod_base = OTHER; note = 2'-O-methoxy nucleoside
  modified_base 18: mod_base = OTHER; note = 2'-fluoro nucleoside
  modified_base 19: mod_base = OTHER; note = 2'-O-methoxy nucleoside
  modified_base 20: mod_base = OTHER; note = 2'-fluoro nucleoside
  modified_base 21: mod_base = OTHER; note = 2'-O-methoxy nucleoside with phosphorothioate bond
  modified_base 22: mod_base = OTHER; note = 2'-fluoro nucleoside with phosphorothioate bond
  modified_base 23: mod_base = OTHER; note = 2'-O-methoxy nucleoside
cttttccgaataaactccaggcc

SEQ ID NO: 271 - RNA, 23 nt, synthetic construct
  source 1..23: mol_type = other RNA
  modified_base 1: mod_base = OTHER; note = 2'-O-methoxy nucleoside with phosphorothioate bond
  modified_base 2: mod_base = OTHER; note = 2'-fluoro nucleoside with phosphorothioate bond
  modified_base 3: mod_base = OTHER; note = 2'-O-methoxy nucleoside
  modified_base 4: mod_base = OTHER; note = 2'-fluoro nucleoside
  modified_base 5: mod_base = OTHER; note = 2'-O-methoxy nucleoside
  modified_base 6: mod_base = OTHER; note = 2'-fluoro nucleoside
  modified_base 7: mod_base = OTHER; note = 2'-O-methoxy nucleoside
  modified_base 8: mod_base = OTHER; note = 2'-fluoro nucleoside
  modified_base 9: mod_base = OTHER; note = 2'-O-methoxy nucleoside
  modified_base 10: mod_base = OTHER; note = 2'-fluoro nucleoside
  modified_base 11: mod_base = OTHER; note = 2'-O-methoxy nucleoside
  modified_base 12: mod_base = OTHER; note = 2'-fluoro nucleoside
  modified_base 13: mod_base = OTHER; note = 2'-O-methoxy nucleoside
  modified_base 14: mod_base = OTHER; note = 2'-fluoro nucleoside
  modified_base 15: mod_base = OTHER; note = 2'-O-methoxy nucleoside
  modified_base 16: mod_base = OTHER; note = 2'-fluoro nucleoside
  modified_base 17: mod_base = OTHER; note = 2'-O-methoxy nucleoside
  modified_base 18: mod_base = OTHER; note = 2'-fluoro nucleoside
  modified_base 19: mod_base = OTHER; note = 2'-O-methoxy nucleoside
  modified_base 20: mod_base = OTHER; note = 2'-fluoro nucleoside
  modified_base 21: mod_base = OTHER; note = 2'-O-methoxy nucleoside with phosphorothioate bond
  modified_base 22: mod_base = OTHER; note = 2'-fluoro nucleoside with phosphorothioate bond
  modified_base 23: mod_base = OTHER; note = 2'-O-methoxy nucleoside
ccacaggctggaccagctggctt

SEQ ID NO: 272 - RNA, 23 nt, synthetic construct
  source 1..23: mol_type = other RNA
  modified_base 1: mod_base = OTHER; note = 2'-O-methoxy nucleoside with phosphorothioate bond
  modified_base 2: mod_base = OTHER; note = 2'-fluoro nucleoside with phosphorothioate bond
  modified_base 3: mod_base = OTHER; note = 2'-O-methoxy nucleoside
  modified_base 4: mod_base = OTHER; note = 2'-fluoro nucleoside
  modified_base 5: mod_base = OTHER; note = 2'-O-methoxy nucleoside
  modified_base 6: mod_base = OTHER; note = 2'-fluoro nucleoside
  modified_base 7: mod_base = OTHER; note = 2'-O-methoxy nucleoside
  modified_base 8: mod_base = OTHER; note = 2'-fluoro nucleoside
  modified_base 9: mod_base = OTHER; note = 2'-O-methoxy nucleoside
  modified_base 10: mod_base = OTHER; note = 2'-fluoro nucleoside
  modified_base 11: mod_base = OTHER; note = 2'-O-methoxy nucleoside
  modified_base 12: mod_base = OTHER; note = 2'-fluoro nucleoside
  modified_base 13: mod_base = OTHER; note = 2'-O-methoxy nucleoside
  modified_base 14: mod_base = OTHER; note = 2'-fluoro nucleoside
  modified_base 15: mod_base = OTHER; note = 2'-O-methoxy nucleoside
  modified_base 16: mod_base = OTHER; note = 2'-fluoro nucleoside
  modified_base 17: mod_base = OTHER; note = 2'-O-methoxy nucleoside
  modified_base 18: mod_base = OTHER; note = 2'-fluoro nucleoside
  modified_base 19: mod_base = OTHER; note = 2'-O-methoxy nucleoside
  modified_base 20: mod_base = OTHER; note = 2'-fluoro nucleoside
  modified_base 21: mod_base = OTHER; note = 2'-O-methoxy nucleoside with phosphorothioate bond
  modified_base 22: mod_base = OTHER; note = 2'-fluoro nucleoside with phosphorothioate bond
  modified_base 23: mod_base = OTHER; note = 2'-O-methoxy nucleoside
aggggcagcagcaccaccagtgg

SEQ ID NO: 273 - RNA, 23 nt, synthetic construct
  source 1..23: mol_type = other RNA
  modified_base 1: mod_base = OTHER; note = 2'-O-methoxy nucleoside with phosphorothioate bond
  modified_base 2: mod_base = OTHER; note = 2'-fluoro nucleoside with phosphorothioate bond
  modified_base 3: mod_base = OTHER; note = 2'-O-methoxy nucleoside
  modified_base 4: mod_base = OTHER; note = 2'-fluoro nucleoside
  modified_base 5: mod_base = OTHER; note = 2'-O-methoxy nucleoside
  modified_base 6: mod_base = OTHER; note = 2'-fluoro nucleoside
  modified_base 7: mod_base = OTHER; note = 2'-O-methoxy nucleoside
  modified_base 8: mod_base = OTHER; note = 2'-fluoro nucleoside
  modified_base 9: mod_base = OTHER; note = 2'-O-methoxy nucleoside
  modified_base 10: mod_base = OTHER; note = 2'-fluoro nucleoside
  modified_base 11: mod_base = OTHER; note = 2'-O-methoxy nucleoside
  modified_base 12: mod_base = OTHER; note = 2'-fluoro nucleoside
  modified_base 13: mod_base = OTHER; note = 2'-O-methoxy nucleoside
  modified_base 14: mod_base = OTHER; note = 2'-fluoro nucleoside
  modified_base 15: mod_base = OTHER; note = 2'-O-methoxy nucleoside
  modified_base 16: mod_base = OTHER; note = 2'-fluoro nucleoside
  modified_base 17: mod_base = OTHER; note = 2'-O-methoxy nucleoside
  modified_base 18: mod_base = OTHER; note = 2'-fluoro nucleoside
  modified_base 19: mod_base = OTHER; note = 2'-O-methoxy nucleoside
  modified_base 20: mod_base = OTHER; note = 2'-fluoro nucleoside
  modified_base 21: mod_base = OTHER; note = 2'-O-methoxy nucleoside with phosphorothioate bond
  modified_base 22: mod_base = OTHER; note = 2'-fluoro nucleoside with phosphorothioate bond
  modified_base 23: mod_base = OTHER; note = 2'-O-methoxy nucleoside
tgtacccacccgccaggggcagc

SEQ ID NO: 274 - RNA, 23 nt, synthetic construct
  source 1..23: mol_type = other RNA
  modified_base 1: mod_base = OTHER; note = 2'-O-methoxy nucleoside with phosphorothioate bond
  modified_base 2: mod_base = OTHER; note = 2'-fluoro nucleoside with phosphorothioate bond
  modified_base 3: mod_base = OTHER; note = 2'-O-methoxy nucleoside
  modified_base 4: mod_base = OTHER; note = 2'-fluoro nucleoside
  modified_base 5: mod_base = OTHER; note = 2'-O-methoxy nucleoside
  modified_base 6: mod_base = OTHER; note = 2'-fluoro nucleoside
  modified_base 7: mod_base = OTHER; note = 2'-O-methoxy nucleoside
  modified_base 8: mod_base = OTHER; note = 2'-fluoro nucleoside
  modified_base 9: mod_base = OTHER; note = 2'-O-methoxy nucleoside
  modified_base 10: mod_base = OTHER; note = 2'-fluoro nucleoside
  modified_base 11: mod_base = OTHER; note = 2'-O-methoxy nucleoside
  modified_base 12: mod_base = OTHER; note = 2'-fluoro nucleoside
  modified_base 13: mod_base = OTHER; note = 2'-O-methoxy nucleoside
  modified_base 14: mod_base = OTHER; note = 2'-fluoro nucleoside
  modified_base 15: mod_base = OTHER; note = 2'-O-methoxy nucleoside
  modified_base 16: mod_base = OTHER; note = 2'-fluoro nucleoside
  modified_base 17: mod_base = OTHER; note = 2'-O-methoxy nucleoside
  modified_base 18: mod_base = OTHER; note = 2'-fluoro nucleoside
  modified_base 19: mod_base = OTHER; note = 2'-O-methoxy nucleoside
  modified_base 20: mod_base = OTHER; note = 2'-fluoro nucleoside
  modified_base 21: mod_base = OTHER; note = 2'-O-methoxy nucleoside with phosphorothioate bond
  modified_base 22: mod_base = OTHER; note = 2'-fluoro nucleoside with phosphorothioate bond
  modified_base 23: mod_base = OTHER; note = 2'-O-methoxy nucleoside
ttgaggacgcggctgtacccacc

SEQ ID NO: 275 - RNA, 23 nt, synthetic construct
  source 1..23: mol_type = other RNA
  modified_base 1: mod_base = OTHER; note = 2'-O-methoxy nucleoside with phosphorothioate bond
  modified_base 2: mod_base = OTHER; note = 2'-fluoro nucleoside with phosphorothioate bond
  modified_base 3: mod_base = OTHER; note = 2'-O-methoxy nucleoside
  modified_base 4: mod_base = OTHER; note = 2'-fluoro nucleoside
  modified_base 5: mod_base = OTHER; note = 2'-O-methoxy nucleoside
  modified_base 6: mod_base = OTHER; note = 2'-fluoro nucleoside
  modified_base 7: mod_base = OTHER; note = 2'-O-methoxy nucleoside
  modified_base 8: mod_base = OTHER; note = 2'-fluoro nucleoside
  modified_base 9: mod_base = OTHER; note = 2'-O-methoxy nucleoside
  modified_base 10: mod_base = OTHER; note = 2'-fluoro nucleoside
  modified_base 11: mod_base = OTHER; note = 2'-O-methoxy nucleoside
  modified_base 12: mod_base = OTHER; note = 2'-fluoro nucleoside
  modified_base 13: mod_base = OTHER; note = 2'-O-methoxy nucleoside
  modified_base 14: mod_base = OTHER; note = 2'-fluoro nucleoside
  modified_base 15: mod_base = OTHER; note = 2'-O-methoxy nucleoside
  modified_base 16: mod_base = OTHER; note = 2'-fluoro nucleoside
  modified_base 17: mod_base = OTHER; note = 2'-O-methoxy nucleoside
  modified_base 18: mod_base = OTHER; note = 2'-fluoro nucleoside
  modified_base 19: mod_base = OTHER; note = 2'-O-methoxy nucleoside
  modified_base 20: mod_base = OTHER; note = 2'-fluoro nucleoside
  modified_base 21: mod_base = OTHER; note = 2'-O-methoxy nucleoside with phosphorothioate bond
  modified_base 22: mod_base = OTHER; note = 2'-fluoro nucleoside with phosphorothioate bond
  modified_base 23: mod_base = OTHER; note = 2'-O-methoxy nucleoside
tggcaggcggcgttgaggacgcg

SEQ ID NO: 276 - RNA, 23 nt, synthetic construct
  source 1..23: mol_type = other RNA
  modified_base 1: mod_base = OTHER; note = 2'-O-methoxy nucleoside with phosphorothioate bond
  modified_base 2: mod_base = OTHER; note = 2'-fluoro nucleoside with phosphorothioate bond
  modified_base 3: mod_base = OTHER; note = 2'-O-methoxy nucleoside
  modified_base 4: mod_base = OTHER; note = 2'-fluoro nucleoside
  modified_base 5: mod_base = OTHER; note = 2'-O-methoxy nucleoside
  modified_base 6: mod_base = OTHER; note = 2'-fluoro nucleoside
  modified_base 7: mod_base = OTHER; note = 2'-O-methoxy nucleoside
  modified_base 8: mod_base = OTHER; note = 2'-fluoro nucleoside
  modified_base 9: mod_base = OTHER; note = 2'-O-methoxy nucleoside
  modified_base 10: mod_base = OTHER; note = 2'-fluoro nucleoside
  modified_base 11: mod_base = OTHER; note = 2'-O-methoxy nucleoside
  modified_base 12: mod_base = OTHER; note = 2'-fluoro nucleoside
  modified_base 13: mod_base = OTHER; note = 2'-O-methoxy nucleoside
  modified_base 14: mod_base = OTHER; note = 2'-fluoro nucleoside
  modified_base 15: mod_base = OTHER; note = 2'-O-methoxy nucleoside
  modified_base 16: mod_base = OTHER; note = 2'-fluoro nucleoside
  modified_base 17: mod_base = OTHER; note = 2'-O-methoxy nucleoside
  modified_base 18: mod_base = OTHER; note = 2'-fluoro nucleoside
  modified_base 19: mod_base = OTHER; note = 2'-O-methoxy nucleoside
  modified_base 20: mod_base = OTHER; note = 2'-fluoro nucleoside
  modified_base 21: mod_base = OTHER; note = 2'-O-methoxy nucleoside with phosphorothioate bond
  modified_base 22: mod_base = OTHER; note = 2'-fluoro nucleoside with phosphorothioate bond
  modified_base 23: mod_base = OTHER; note = 2'-O-methoxy nucleoside
gcagcggtgaccagcacgacccc

SEQ ID NO: 277 - RNA, 23 nt, synthetic construct
  source 1..23: mol_type = other RNA
  modified_base 1: mod_base = OTHER; note = 2'-O-methoxy nucleoside with phosphorothioate bond
  modified_base 2: mod_base = OTHER; note = 2'-fluoro nucleoside with phosphorothioate bond
  modified_base 3: mod_base = OTHER; note = 2'-O-methoxy nucleoside
  modified_base 4: mod_base = OTHER; note = 2'-fluoro nucleoside
  modified_base 5: mod_base = OTHER; note = 2'-O-methoxy nucleoside
  modified_base 6: mod_base = OTHER; note = 2'-fluoro nucleoside
  modified_base 7: mod_base = OTHER; note = 2'-O-methoxy nucleoside
  modified_base 8: mod_base = OTHER; note = 2'-fluoro nucleoside
  modified_base 9: mod_base = OTHER; note = 2'-O-methoxy nucleoside
  modified_base 10: mod_base = OTHER; note = 2'-fluoro nucleoside
  modified_base 11: mod_base = OTHER; note = 2'-O-methoxy nucleoside
  modified_base 12: mod_base = OTHER; note = 2'-fluoro nucleoside
  modified_base 13: mod_base = OTHER; note = 2'-O-methoxy nucleoside
  modified_base 14: mod_base = OTHER; note = 2'-fluoro nucleoside
  modified_base 15: mod_base = OTHER; note = 2'-O-methoxy nucleoside
  modified_base 16: mod_base = OTHER; note = 2'-fluoro nucleoside
  modified_base 17: mod_base = OTHER; note = 2'-O-methoxy nucleoside
  modified_base 18: mod_base = OTHER; note = 2'-fluoro nucleoside
  modified_base 19: mod_base = OTHER; note = 2'-O-methoxy nucleoside
  modified_base 20: mod_base = OTHER; note = 2'-fluoro nucleoside
  modified_base 21: mod_base = OTHER; note = 2'-O-methoxy nucleoside with phosphorothioate bond
  modified_base 22: mod_base = OTHER; note = 2'-fluoro nucleoside with phosphorothioate bond
  modified_base 23: mod_base = OTHER; note = 2'-O-methoxy nucleoside
tggaggcaccaatgatgtcctcc

SEQ ID NO: 278 - RNA, 23 nt, synthetic construct
  source 1..23: mol_type = other RNA
  modified_base 1: mod_base = OTHER; note = 2'-O-methoxy nucleoside with phosphorothioate bond
  modified_base 2: mod_base = OTHER; note = 2'-fluoro nucleoside with phosphorothioate bond
  modified_base 3: mod_base = OTHER; note = 2'-O-methoxy nucleoside
  modified_base 4: mod_base = OTHER; note = 2'-fluoro nucleoside
  modified_base 5: mod_base = OTHER; note = 2'-O-methoxy nucleoside
  modified_base 6: mod_base = OTHER; note = 2'-fluoro nucleoside
  modified_base 7: mod_base = OTHER; note = 2'-O-methoxy nucleoside
  modified_base 8: mod_base = OTHER; note = 2'-fluoro nucleoside
  modified_base 9: mod_base = OTHER; note = 2'-O-methoxy nucleoside
  modified_base 10: mod_base = OTHER; note = 2'-fluoro nucleoside
  modified_base 11: mod_base = OTHER; note = 2'-O-methoxy nucleoside
  modified_base 12: mod_base = OTHER; note = 2'-fluoro nucleoside
  modified_base 13: mod_base = OTHER; note = 2'-O-methoxy nucleoside
  modified_base 14: mod_base = OTHER; note = 2'-fluoro nucleoside
  modified_base 15: mod_base = OTHER; note = 2'-O-methoxy nucleoside
  modified_base 16: mod_base = OTHER; note = 2'-fluoro nucleoside
  modified_base 17: mod_base = OTHER; note = 2'-O-methoxy nucleoside
  modified_base 18: mod_base = OTHER; note = 2'-fluoro nucleoside
  modified_base 19: mod_base = OTHER; note = 2'-O-methoxy nucleoside
  modified_base 20: mod_base = OTHER; note = 2'-fluoro nucleoside
  modified_base 21: mod_base = OTHER; note = 2'-O-methoxy nucleoside with phosphorothioate bond
  modified_base 22: mod_base = OTHER; note = 2'-fluoro nucleoside with phosphorothioate bond
  modified_base 23: mod_base = OTHER; note = 2'-O-methoxy nucleoside
agtcgctggaggcaccaatgatg

SEQ ID NO: 279 - RNA, 23 nt, synthetic construct
  source 1..23: mol_type = other RNA
  modified_base 1: mod_base = OTHER; note = 2'-O-methoxy nucleoside with phosphorothioate bond
  modified_base 2: mod_base = OTHER; note = 2'-fluoro nucleoside with phosphorothioate bond
  modified_base 3: mod_base = OTHER; note = 2'-O-methoxy nucleoside
  modified_base 4: mod_base = OTHER; note = 2'-fluoro nucleoside
  modified_base 5: mod_base = OTHER; note = 2'-O-methoxy nucleoside
  modified_base 6: mod_base = OTHER; note = 2'-fluoro nucleoside
  modified_base 7: mod_base = OTHER; note = 2'-O-methoxy nucleoside
  modified_base 8: mod_base = OTHER; note = 2'-fluoro nucleoside
  modified_base 9: mod_base = OTHER; note = 2'-O-methoxy nucleoside
  modified_base 10: mod_base = OTHER; note = 2'-fluoro nucleoside
  modified_base 11: mod_base = OTHER; note = 2'-O-methoxy nucleoside
  modified_base 12: mod_base = OTHER; note = 2'-fluoro nucleoside
  modified_base 13: mod_base = OTHER; note = 2'-O-methoxy nucleoside
  modified_base 14: mod_base = OTHER; note = 2'-fluoro nucleoside
  modified_base 15: mod_base = OTHER; note = 2'-O-methoxy nucleoside
  modified_base 16: mod_base = OTHER; note = 2'-fluoro nucleoside
  modified_base 17: mod_base = OTHER; note = 2'-O-methoxy nucleoside
  modified_base 18: mod_base = OTHER; note = 2'-fluoro nucleoside
  modified_base 19: mod_base = OTHER; note = 2'-O-methoxy nucleoside
  modified_base 20: mod_base = OTHER; note = 2'-fluoro nucleoside
  modified_base 21: mod_base = OTHER; note = 2'-O-methoxy nucleoside with phosphorothioate bond
  modified_base 22: mod_base = OTHER; note = 2'-fluoro nucleoside with phosphorothioate bond
  modified_base 23: mod_base = OTHER; note = 2'-O-methoxy nucleoside
tgctgcagtcgctggaggcacca

SEQ ID NO: 280 - RNA, 23 nt, synthetic construct
  source 1..23: mol_type = other RNA
  modified_base 1: mod_base = OTHER; note = 2'-O-methoxy nucleoside with phosphorothioate bond
  modified_base 2: mod_base = OTHER; note = 2'-fluoro nucleoside with phosphorothioate bond
  modified_base 3: mod_base = OTHER; note = 2'-O-methoxy nucleoside
  modified_base 4: mod_base = OTHER; note = 2'-fluoro nucleoside
  modified_base 5: mod_base = OTHER; note = 2'-O-methoxy nucleoside
  modified_base 6: mod_base = OTHER; note = 2'-fluoro nucleoside
  modified_base 7: mod_base = OTHER; note = 2'-O-methoxy nucleoside
  modified_base 8: mod_base = OTHER; note = 2'-fluoro nucleoside
  modified_base 9: mod_base = OTHER; note = 2'-O-methoxy nucleoside
  modified_base 10: mod_base = OTHER; note = 2'-fluoro nucleoside
  modified_base 11: mod_base = OTHER; note = 2'-O-methoxy nucleoside
  modified_base 12: mod_base = OTHER; note = 2'-fluoro nucleoside
  modified_base 13: mod_base = OTHER; note = 2'-O-methoxy nucleoside
  modified_base 14: mod_base = OTHER; note = 2'-fluoro nucleoside
  modified_base 15: mod_base = OTHER; note = 2'-O-methoxy nucleoside
  modified_base 16: mod_base = OTHER; note = 2'-fluoro nucleoside
  modified_base 17: mod_base = OTHER; note = 2'-O-methoxy nucleoside
  modified_base 18: mod_base = OTHER; note = 2'-fluoro nucleoside
  modified_base 19: mod_base = OTHER; note = 2'-O-methoxy nucleoside
  modified_base 20: mod_base = OTHER; note = 2'-fluoro nucleoside
  modified_base 21: mod_base = OTHER; note = 2'-O-methoxy nucleoside with phosphorothioate bond
  modified_base 22: mod_base = OTHER; note = 2'-fluoro nucleoside with phosphorothioate bond
  modified_base 23: mod_base = OTHER; note = 2'-O-methoxy nucleoside
aaagcaggtgctgcagtcgctgg

SEQ ID NO: 281 - RNA, 23 nt, synthetic construct
  source 1..23: mol_type = other RNA
  modified_base 1: mod_base = OTHER; note = 2'-O-methoxy nucleoside with phosphorothioate bond
  modified_base 2: mod_base = OTHER; note = 2'-fluoro nucleoside with phosphorothioate bond
  modified_base 3: mod_base = OTHER; note = 2'-O-methoxy nucleoside
  modified_base 4: mod_base = OTHER; note = 2'-fluoro nucleoside
  modified_base 5: mod_base = OTHER; note = 2'-O-methoxy nucleoside
  modified_base 6: mod_base = OTHER; note = 2'-fluoro nucleoside
  modified_base 7: mod_base = OTHER; note = 2'-O-methoxy nucleoside
  modified_base 8: mod_base = OTHER; note = 2'-fluoro nucleoside
  modified_base 9: mod_base = OTHER; note = 2'-O-methoxy nucleoside
  modified_base 10: mod_base = OTHER; note = 2'-fluoro nucleoside
  modified_base 11: mod_base = OTHER; note = 2'-O-methoxy nucleoside
  modified_base 12: mod_base = OTHER; note = 2'-fluoro nucleoside
  modified_base 13: mod_base = OTHER; note = 2'-O-methoxy nucleoside
  modified_base 14: mod_base = OTHER; note = 2'-fluoro nucleoside
  modified_base 15: mod_base = OTHER; note = 2'-O-methoxy nucleoside
  modified_base 16: mod_base = OTHER; note = 2'-fluoro nucleoside
  modified_base 17: mod_base = OTHER; note = 2'-O-methoxy nucleoside
  modified_base 18: mod_base = OTHER; note = 2'-fluoro nucleoside
  modified_base 19: mod_base = OTHER; note = 2'-O-methoxy nucleoside
  modified_base 20: mod_base = OTHER; note = 2'-fluoro nucleoside
  modified_base 21: mod_base = OTHER; note = 2'-O-methoxy nucleoside with phosphorothioate bond
  modified_base 22: mod_base = OTHER; note = 2'-fluoro nucleoside with phosphorothioate bond
  modified_base 23: mod_base = OTHER; note = 2'-O-methoxy nucleoside
tctgtgacacaaagcaggtgctg

SEQ ID NO: 282 - RNA, 23 nt, synthetic construct
  source 1..23: mol_type = other RNA
  modified_base 1: mod_base = OTHER; note = 2'-O-methoxy nucleoside with phosphorothioate bond
  modified_base 2: mod_base = OTHER; note = 2'-fluoro nucleoside with phosphorothioate bond
  modified_base 3: mod_base = OTHER; note = 2'-O-methoxy nucleoside
  modified_base 4: mod_base = OTHER; note = 2'-fluoro nucleoside
  modified_base 5: mod_base = OTHER; note = 2'-O-methoxy nucleoside
  modified_base 6: mod_base = OTHER; note = 2'-fluoro nucleoside
  modified_base 7: mod_base = OTHER; note = 2'-O-methoxy nucleoside
  modified_base 8: mod_base = OTHER; note = 2'-fluoro nucleoside
  modified_base 9: mod_base = OTHER; note = 2'-O-methoxy nucleoside
  modified_base 10: mod_base = OTHER; note = 2'-fluoro nucleoside
  modified_base 11: mod_base = OTHER; note = 2'-O-methoxy nucleoside
  modified_base 12: mod_base = OTHER; note = 2'-fluoro nucleoside
  modified_base 13: mod_base = OTHER; note = 2'-O-methoxy nucleoside
  modified_base 14: mod_base = OTHER; note = 2'-fluoro nucleoside
  modified_base 15: mod_base = OTHER; note = 2'-O-methoxy nucleoside
  modified_base 16: mod_base = OTHER; note = 2'-fluoro nucleoside
  modified_base 17: mod_base = OTHER; note = 2'-O-methoxy nucleoside
  modified_base 18: mod_base = OTHER; note = 2'-fluoro nucleoside
  modified_base 19: mod_base = OTHER; note = 2'-O-methoxy nucleoside
  modified_base 20: mod_base = OTHER; note = 2'-fluoro nucleoside
  modified_base 21: mod_base = OTHER; note = 2'-O-methoxy nucleoside with phosphorothioate bond
  modified_base 22: mod_base = OTHER; note = 2'-fluoro nucleoside with phosphorothioate bond
  modified_base 23: mod_base = OTHER; note = 2'-O-methoxy nucleoside
gtcccactctgtgacacaaagca

SEQ ID NO: 283 - RNA, 23 nt, synthetic construct
  source 1..23: mol_type = other RNA
  modified_base 1: mod_base = OTHER; note = 2'-O-methoxy nucleoside with phosphorothioate bond
  modified_base 2: mod_base = OTHER; note = 2'-fluoro nucleoside with phosphorothioate bond
  modified_base 3: mod_base = OTHER; note = 2'-O-methoxy nucleoside
  modified_base 4: mod_base = OTHER; note = 2'-fluoro nucleoside
  modified_base 5: mod_base = OTHER; note = 2'-O-methoxy nucleoside
  modified_base 6: mod_base = OTHER; note = 2'-fluoro nucleoside
  modified_base 7: mod_base = OTHER; note = 2'-O-methoxy nucleoside
  modified_base 8: mod_base = OTHER; note = 2'-fluoro nucleoside
  modified_base 9: mod_base = OTHER; note = 2'-O-methoxy nucleoside
  modified_base 10: mod_base = OTHER; note = 2'-fluoro nucleoside
  modified_base 11: mod_base = OTHER; note = 2'-O-methoxy nucleoside
  modified_base 12: mod_base = OTHER; note = 2'-fluoro nucleoside
  modified_base 13: mod_base = OTHER; note = 2'-O-methoxy nucleoside
  modified_base 14: mod_base = OTHER; note = 2'-fluoro nucleoside
  modified_base 15: mod_base = OTHER; note = 2'-O-methoxy nucleoside
  modified_base 16: mod_base = OTHER; note = 2'-fluoro nucleoside
  modified_base 17: mod_base = OTHER; note = 2'-O-methoxy nucleoside
  modified_base 18: mod_base = OTHER; note = 2'-fluoro nucleoside
  modified_base 19: mod_base = OTHER; note = 2'-O-methoxy nucleoside
  modified_base 20: mod_base = OTHER; note = 2'-fluoro nucleoside
  modified_base 21: mod_base = OTHER; note = 2'-O-methoxy nucleoside with phosphorothioate bond
  modified_base 22: mod_base = OTHER; note = 2'-fluoro nucleoside with phosphorothioate bond
  modified_base 23: mod_base = OTHER; note = 2'-O-methoxy nucleoside
agcagcctgtgatgtcccactct

SEQ ID NO: 284 - RNA, 23 nt, synthetic construct
  source 1..23: mol_type = other RNA
  modified_base 1: mod_base = OTHER; note = 2'-O-methoxy nucleoside with phosphorothioate bond
  modified_base 2: mod_base = OTHER; note = 2'-fluoro nucleoside with phosphorothioate bond
  modified_base 3: mod_base = OTHER; note = 2'-O-methoxy nucleoside
  modified_base 4: mod_base = OTHER; note = 2'-fluoro nucleoside
  modified_base 5: mod_base = OTHER; note = 2'-O-methoxy nucleoside
  modified_base 6: mod_base = OTHER; note = 2'-fluoro nucleoside
  modified_base 7: mod_base = OTHER; note = 2'-O-methoxy nucleoside
  modified_base 8: mod_base = OTHER; note = 2'-fluoro nucleoside
  modified_base 9: mod_base = OTHER; note = 2'-O-methoxy nucleoside
  modified_base 10: mod_base = OTHER; note = 2'-fluoro nucleoside
  modified_base 11: mod_base = OTHER; note = 2'-O-methoxy nucleoside
  modified_base 12: mod_base = OTHER; note = 2'-fluoro nucleoside
  modified_base 13: mod_base = OTHER; note = 2'-O-methoxy nucleoside
  modified_base 14: mod_base = OTHER; note = 2'-fluoro nucleoside
  modified_base 15: mod_base = OTHER; note = 2'-O-methoxy nucleoside
  modified_base 16: mod_base = OTHER; note = 2'-fluoro nucleoside
  modified_base 17: mod_base = OTHER; note = 2'-O-methoxy nucleoside
  modified_base 18: mod_base = OTHER; note = 2'-fluoro nucleoside
  modified_base 19: mod_base = OTHER; note = 2'-O-methoxy nucleoside
  modified_base 20: mod_base = OTHER; note = 2'-fluoro nucleoside
  modified_base 21: mod_base = OTHER; note = 2'-O-methoxy nucleoside with phosphorothioate bond
  modified_base 22: mod_base = OTHER; note = 2'-fluoro nucleoside with phosphorothioate bond
  modified_base 23: mod_base = OTHER; note = 2'-O-methoxy nucleoside
acgtgggcagcagcctgtgatgt

SEQ ID NO: 285 - RNA, 23 nt, synthetic construct
  source 1..23: mol_type = other RNA
  modified_base 1: mod_base = OTHER; note = 2'-O-methoxy nucleoside with phosphorothioate bond
  modified_base 2: mod_base = OTHER; note = 2'-fluoro nucleoside with phosphorothioate bond
  modified_base 3: mod_base = OTHER; note = 2'-O-methoxy nucleoside
  modified_base 4: mod_base = OTHER; note = 2'-fluoro nucleoside
  modified_base 5: mod_base = OTHER; note = 2'-O-methoxy nucleoside
  modified_base 6: mod_base = OTHER; note = 2'-fluoro nucleoside
  modified_base 7: mod_base = OTHER; note = 2'-O-methoxy nucleoside
  modified_base 8: mod_base = OTHER; note = 2'-fluoro nucleoside
  modified_base 9: mod_base = OTHER; note = 2'-O-methoxy nucleoside
  modified_base 10: mod_base = OTHER; note = 2'-fluoro nucleoside
  modified_base 11: mod_base = OTHER; note = 2'-O-methoxy nucleoside
  modified_base 12: mod_base = OTHER; note = 2'-fluoro nucleoside
  modified_base 13: mod_base = OTHER; note = 2'-O-methoxy nucleoside
  modified_base 14: mod_base = OTHER; note = 2'-fluoro nucleoside
  modified_base 15: mod_base = OTHER; note = 2'-O-methoxy nucleoside
  modified_base 16: mod_base = OTHER; note = 2'-fluoro nucleoside
  modified_base 17: mod_base = OTHER; note = 2'-O-methoxy nucleoside
  modified_base 18: mod_base = OTHER; note = 2'-fluoro nucleoside
  modified_base 19: mod_base = OTHER; note = 2'-O-methoxy nucleoside
  modified_base 20: mod_base = OTHER; note = 2'-fluoro nucleoside
  modified_base 21: mod_base = OTHER; note = 2'-O-methoxy nucleoside with phosphorothioate bond
  modified_base 22: mod_base = OTHER; note = 2'-fluoro nucleoside with phosphorothioate bond
  modified_base 23: mod_base = OTHER; note = 2'-O-methoxy nucleoside
tgagctccggctcggcagacagc

SEQ ID NO: 286 - RNA, 23 nt, synthetic construct
  source 1..23: mol_type = other RNA
  modified_base 1: mod_base = OTHER; note = 2'-O-methoxy nucleoside with phosphorothioate bond
  modified_base 2: mod_base = OTHER; note = 2'-fluoro nucleoside with phosphorothioate bond
  modified_base 3: mod_base = OTHER; note = 2'-O-methoxy nucleoside
  modified_base 4: mod_base = OTHER; note = 2'-fluoro nucleoside
  modified_base 5: mod_base = OTHER; note = 2'-O-methoxy nucleoside
  modified_base 6: mod_base = OTHER; note = 2'-fluoro nucleoside
  modified_base 7: mod_base = OTHER; note = 2'-O-methoxy nucleoside
  modified_base 8: mod_base = OTHER; note = 2'-fluoro nucleoside
  modified_base 9: mod_base = OTHER; note = 2'-O-methoxy nucleoside
  modified_base 10: mod_base = OTHER; note = 2'-fluoro nucleoside
  modified_base 11: mod_base = OTHER; note = 2'-O-methoxy nucleoside
  modified_base 12: mod_base = OTHER; note = 2'-fluoro nucleoside
  modified_base 13: mod_base = OTHER; note = 2'-O-methoxy nucleoside
  modified_base 14: mod_base = OTHER; note = 2'-fluoro nucleoside
  modified_base 15: mod_base = OTHER; note = 2'-O-methoxy nucleoside
  modified_base 16: mod_base = OTHER; note = 2'-fluoro nucleoside
  modified_base 17: mod_base = OTHER; note = 2'-O-methoxy nucleoside
  modified_base 18: mod_base = OTHER; note = 2'-fluoro nucleoside
  modified_base 19: mod_base = OTHER; note = 2'-O-methoxy nucleoside
  modified_base 20: mod_base = OTHER; note = 2'-fluoro nucleoside
  modified_base 21: mod_base = OTHER; note = 2'-O-methoxy nucleoside with phosphorothioate bond
  modified_base 22: mod_base = OTHER; note = 2'-fluoro nucleoside with phosphorothioate bond
  modified_base 23: mod_base = OTHER; note = 2'-O-methoxy nucleoside
agtctctgcctcaactcggccag

SEQ ID NO: 287 - RNA, 23 nt, synthetic construct
  source 1..23: mol_type = other RNA
  modified_base 1: mod_base = OTHER; note = 2'-O-methoxy nucleoside with phosphorothioate bond
  modified_base 2: mod_base = OTHER; note = 2'-fluoro nucleoside with phosphorothioate bond
  modified_base 3: mod_base = OTHER; note = 2'-O-methoxy nucleoside
  modified_base 4: mod_base = OTHER; note = 2'-fluoro nucleoside
  modified_base 5: mod_base = OTHER; note = 2'-O-methoxy nucleoside
  modified_base 6: mod_base = OTHER; note = 2'-fluoro nucleoside
  modified_base 7: mod_base = OTHER; note = 2'-O-methoxy nucleoside
  modified_base 8: mod_base = OTHER; note = 2'-fluoro nucleoside
  modified_base 9: mod_base = OTHER; note = 2'-O-methoxy nucleoside
  modified_base 10: mod_base = OTHER; note = 2'-fluoro nucleoside
  modified_base 11: mod_base = OTHER; note = 2'-O-methoxy nucleoside
  modified_base 12: mod_base = OTHER; note = 2'-fluoro nucleoside
  modified_base 13: mod_base = OTHER; note = 2'-O-methoxy nucleoside
  modified_base 14: mod_base = OTHER; note = 2'-fluoro nucleoside
  modified_base 15: mod_base = OTHER; note = 2'-O-methoxy nucleoside
  modified_base 16: mod_base = OTHER; note = 2'-fluoro nucleoside
  modified_base 17: mod_base = OTHER; note = 2'-O-methoxy nucleoside
  modified_base 18: mod_base = OTHER; note = 2'-fluoro nucleoside
  modified_base 19: mod_base = OTHER; note = 2'-O-methoxy nucleoside
  modified_base 20: mod_base = OTHER; note = 2'-fluoro nucleoside
  modified_base 21: mod_base = OTHER; note = 2'-O-methoxy nucleoside with phosphorothioate bond
  modified_base 22: mod_base = OTHER; note = 2'-fluoro nucleoside with phosphorothioate bond
  modified_base 23: mod_base = OTHER; note = 2'-O-methoxy nucleoside
tggcagcaggaagcgtggatgct

SEQ ID NO: 288 - RNA, 23 nt, synthetic construct
  source 1..23: mol_type = other RNA
  modified_base 1: mod_base = OTHER; note = 2'-O-methoxy nucleoside with phosphorothioate bond
  modified_base 2: mod_base = OTHER; note = 2'-fluoro nucleoside with phosphorothioate bond
  modified_base 3: mod_base = OTHER; note = 2'-O-methoxy nucleoside
  modified_base 4: mod_base = OTHER; note = 2'-fluoro nucleoside
  modified_base 5: mod_base = OTHER; note = 2'-O-methoxy nucleoside
  modified_base 6: mod_base = OTHER; note = 2'-fluoro nucleoside
  modified_base 7: mod_base = OTHER; note = 2'-O-methoxy nucleoside
  modified_base 8: mod_base = OTHER; note = 2'-fluoro nucleoside
  modified_base 9: mod_base = OTHER; note = 2'-O-methoxy nucleoside
  modified_base 10: mod_base = OTHER; note = 2'-fluoro nucleoside
  modified_base 11: mod_base = OTHER; note = 2'-O-methoxy nucleoside
  modified_base 12: mod_base = OTHER; note = 2'-fluoro nucleoside
  modified_base 13: mod_base = OTHER; note = 2'-O-methoxy nucleoside
  modified_base 14: mod_base = OTHER; note = 2'-fluoro nucleoside
  modified_base 15: mod_base = OTHER; note = 2'-O-methoxy nucleoside
  modified_base 16: mod_base = OTHER; note = 2'-fluoro nucleoside
  modified_base 17: mod_base = OTHER; note = 2'-O-methoxy nucleoside
  modified_base 18: mod_base = OTHER; note = 2'-fluoro nucleoside
  modified_base 19: mod_base = OTHER; note = 2'-O-methoxy nucleoside
  modified_base 20: mod_base = OTHER; note = 2'-fluoro nucleoside
  modified_base 21: mod_base = OTHER; note = 2'-O-methoxy nucleoside with phosphorothioate bond
  modified_base 22: mod_base = OTHER; note = 2'-fluoro nucleoside with phosphorothioate bond
  modified_base 23: mod_base = OTHER; note = 2'-O-methoxy nucleoside
actttgcattccagacctggggc

SEQ ID NO: 289 - RNA, 23 nt, synthetic construct
  source 1..23: mol_type = other RNA
  modified_base 1: mod_base = OTHER; note = 2'-O-methoxy nucleoside with phosphorothioate bond
  modified_base 2: mod_base = OTHER; note = 2'-fluoro nucleoside with phosphorothioate bond
  modified_base 3: mod_base = OTHER; note = 2'-O-methoxy nucleoside
  modified_base 4: mod_base = OTHER; note = 2'-fluoro nucleoside
  modified_base 5: mod_base = OTHER; note = 2'-O-methoxy nucleoside
  modified_base 6: mod_base = OTHER; note = 2'-fluoro nucleoside
  modified_base 7: mod_base = OTHER; note = 2'-O-methoxy nucleoside
  modified_base 8: mod_base = OTHER; note = 2'-fluoro nucleoside
  modified_base 9: mod_base = OTHER; note = 2'-O-methoxy nucleoside
  modified_base 10: mod_base = OTHER; note = 2'-fluoro nucleoside
  modified_base 11: mod_base = OTHER; note = 2'-O-methoxy nucleoside
  modified_base 12: mod_base = OTHER; note = 2'-fluoro nucleoside
  modified_base 13: mod_base = OTHER; note = 2'-O-methoxy nucleoside
  modified_base 14: mod_base = OTHER; note = 2'-fluoro nucleoside
  modified_base 15: mod_base = OTHER; note = 2'-O-methoxy nucleoside
  modified_base 16: mod_base = OTHER; note = 2'-fluoro nucleoside
  modified_base 17: mod_base = OTHER; note = 2'-O-methoxy nucleoside
  modified_base 18: mod_base = OTHER; note = 2'-fluoro nucleoside
  modified_base 19: mod_base = OTHER; note = 2'-O-methoxy nucleoside
  modified_base 20: mod_base = OTHER; note = 2'-fluoro nucleoside
  modified_base 21: mod_base = OTHER; note = 2'-O-methoxy nucleoside with phosphorothioate bond
  modified_base 22: mod_base = OTHER; note = 2'-fluoro nucleoside with phosphorothioate bond
  modified_base 23: mod_base = OTHER; note = 2'-O-methoxy nucleoside
ttgactttgcattccagacctgg

SEQ ID NO: 290 - RNA, 23 nt, synthetic construct
  source 1..23: mol_type = other RNA
  modified_base 1: mod_base = OTHER; note = 2'-O-methoxy nucleoside with phosphorothioate bond
  modified_base 2: mod_base = OTHER; note = 2'-fluoro nucleoside with phosphorothioate bond
  modified_base 3: mod_base = OTHER; note = 2'-O-methoxy nucleoside
  modified_base 4: mod_base = OTHER; note = 2'-fluoro nucleoside
  modified_base 5: mod_base = OTHER; note = 2'-O-methoxy nucleoside
  modified_base 6: mod_base = OTHER; note = 2'-fluoro nucleoside
  modified_base 7: mod_base = OTHER; note = 2'-O-methoxy nucleoside
  modified_base 8: mod_base = OTHER; note = 2'-fluoro nucleoside
  modified_base 9: mod_base = OTHER; note = 2'-O-methoxy nucleoside
  modified_base 10: mod_base = OTHER; note = 2'-fluoro nucleoside
  modified_base 11: mod_base = OTHER; note = 2'-O-methoxy nucleoside
  modified_base 12: mod_base = OTHER; note = 2'-fluoro nucleoside
  modified_base 13: mod_base = OTHER; note = 2'-O-methoxy nucleoside
  modified_base 14: mod_base = OTHER; note = 2'-fluoro nucleoside
  modified_base 15: mod_base = OTHER; note = 2'-O-methoxy nucleoside
  modified_base 16: mod_base = OTHER; note = 2'-fluoro nucleoside
  modified_base 17: mod_base = OTHER; note = 2'-O-methoxy nucleoside
  modified_base 18: mod_base = OTHER; note = 2'-fluoro nucleoside
  modified_base 19: mod_base = OTHER; note = 2'-O-methoxy nucleoside
  modified_base 20: mod_base = OTHER; note = 2'-fluoro nucleoside
  modified_base 21: mod_base = OTHER; note = 2'-O-methoxy nucleoside with phosphorothioate bond
  modified_base 22: mod_base = OTHER; note = 2'-fluoro nucleoside with phosphorothioate bond
  modified_base 23: mod_base = OTHER; note = 2'-O-methoxy nucleoside
atgctccttgactttgcattcca

SEQ ID NO: 291 - RNA, 23 nt, synthetic construct
  source 1..23: mol_type = other RNA
  modified_base 1: mod_base = OTHER; note = 2'-O-methoxy nucleoside with phosphorothioate bond
  modified_base 2: mod_base = OTHER; note = 2'-fluoro nucleoside with phosphorothioate bond
  modified_base 3: mod_base = OTHER; note = 2'-O-methoxy nucleoside
  modified_base 4: mod_base = OTHER; note = 2'-fluoro nucleoside
  modified_base 5: mod_base = OTHER; note = 2'-O-methoxy nucleoside
  modified_base 6: mod_base = OTHER; note = 2'-fluoro nucleoside
  modified_base 7: mod_base = OTHER; note = 2'-O-methoxy nucleoside
  modified_base 8: mod_base = OTHER; note = 2'-fluoro nucleoside
  modified_base 9: mod_base = OTHER; note = 2'-O-methoxy nucleoside
  modified_base 10: mod_base = OTHER; note = 2'-fluoro nucleoside
  modified_base 11: mod_base = OTHER; note = 2'-O-methoxy nucleoside
  modified_base 12: mod_base = OTHER; note = 2'-fluoro nucleoside
  modified_base 13: mod_base = OTHER; note = 2'-O-methoxy nucleoside
  modified_base 14: mod_base = OTHER; note = 2'-fluoro nucleoside
  modified_base 15: mod_base = OTHER; note = 2'-O-methoxy nucleoside
  modified_base 16: mod_base = OTHER; note = 2'-fluoro nucleoside
  modified_base 17: mod_base = OTHER; note = 2'-O-methoxy nucleoside
  modified_base 18: mod_base = OTHER; note = 2'-fluoro nucleoside
  modified_base 19: mod_base = OTHER; note = 2'-O-methoxy nucleoside
  modified_base 20: mod_base = OTHER; note = 2'-fluoro nucleoside
  modified_base 21: mod_base = OTHER; note = 2'-O-methoxy nucleoside with phosphorothioate bond
  modified_base 22: mod_base = OTHER; note = 2'-fluoro nucleoside with phosphorothioate bond
  modified_base 23: mod_base = OTHER; note = 2'-O-methoxy nucleoside
attccatgctccttgactttgca

SEQ ID NO: 292 - RNA, 23 nt, synthetic construct
  source 1..23: mol_type = other RNA
  modified_base 1: mod_base = OTHER; note = 2'-O-methoxy nucleoside with phosphorothioate bond
  modified_base 2: mod_base = OTHER; note = 2'-fluoro nucleoside with phosphorothioate bond
  modified_base 3: mod_base = OTHER; note = 2'-O-methoxy nucleoside
  modified_base 4: mod_base = OTHER; note = 2'-fluoro nucleoside
  modified_base 5: mod_base = OTHER; note = 2'-O-methoxy nucleoside
  modified_base 6: mod_base = OTHER; note = 2'-fluoro nucleoside
  modified_base 7: mod_base = OTHER; note = 2'-O-methoxy nucleoside
  modified_base 8: mod_base = OTHER; note = 2'-fluoro nucleoside
  modified_base 9: mod_base = OTHER; note = 2'-O-methoxy nucleoside
  modified_base 10: mod_base = OTHER; note = 2'-fluoro nucleoside
  modified_base 11: mod_base = OTHER; note = 2'-O-methoxy nucleoside
  modified_base 12: mod_base = OTHER; note = 2'-fluoro nucleoside
  modified_base 13: mod_base = OTHER; note = 2'-O-methoxy nucleoside
  modified_base 14: mod_base = OTHER; note = 2'-fluoro nucleoside
  modified_base 15: mod_base = OTHER; note = 2'-O-methoxy nucleoside
  modified_base 16: mod_base = OTHER; note = 2'-fluoro nucleoside
  modified_base 17: mod_base = OTHER; note = 2'-O-methoxy nucleoside
  modified_base 18: mod_base = OTHER; note = 2'-fluoro nucleoside
  modified_base 19: mod_base = OTHER; note = 2'-O-methoxy nucleoside
  modified_base 20: mod_base = OTHER; note = 2'-fluoro nucleoside
  modified_base 21: mod_base = OTHER; note = 2'-O-methoxy nucleoside with phosphorothioate bond
  modified_base 22: mod_base = OTHER; note = 2'-fluoro nucleoside with phosphorothioate bond
  modified_base 23: mod_base = OTHER; note = 2'-O-methoxy nucleoside
acggtcacctgctcctgaggggc

SEQ ID NO: 293 - RNA, 23 nt, synthetic construct
  source 1..23: mol_type = other RNA
  modified_base 1: mod_base = OTHER; note = 2'-O-methoxy nucleoside with phosphorothioate bond
  modified_base 2: mod_base = OTHER; note = 2'-fluoro nucleoside with phosphorothioate bond
  modified_base 3: mod_base = OTHER; note = 2'-O-methoxy nucleoside
  modified_base 4: mod_base = OTHER; note = 2'-fluoro nucleoside
  modified_base 5: mod_base = OTHER; note = 2'-O-methoxy nucleoside
  modified_base 6: mod_base = OTHER; note = 2'-fluoro nucleoside
  modified_base 7: mod_base = OTHER; note = 2'-O-methoxy nucleoside
  modified_base 8: mod_base = OTHER; note = 2'-fluoro nucleoside
  modified_base 9: mod_base = OTHER; note = 2'-O-methoxy nucleoside
  modified_base 10: mod_base = OTHER; note = 2'-fluoro nucleoside
  modified_base 11: mod_base = OTHER; note = 2'-O-methoxy nucleoside
  modified_base 12: mod_base = OTHER; note = 2'-fluoro nucleoside
  modified_base 13: mod_base = OTHER; note = 2'-O-methoxy nucleoside
  modified_base 14: mod_base = OTHER; note = 2'-fluoro nucleoside
  modified_base 15: mod_base = OTHER; note = 2'-O-methoxy nucleoside
  modified_base 16: mod_base = OTHER; note = 2'-fluoro nucleoside
  modified_base 17: mod_base = OTHER; note = 2'-O-methoxy nucleoside
  modified_base 18: mod_base = OTHER; note = 2'-fluoro nucleoside
  modified_base 19: mod_base = OTHER; note = 2'-O-methoxy nucleoside
  modified_base 20: mod_base = OTHER; note = 2'-fluoro nucleoside
  modified_base 21: mod_base = OTHER; note = 2'-O-methoxy nucleoside with phosphorothioate bond
  modified_base 22: mod_base = OTHER; note = 2'-fluoro nucleoside with phosphorothioate bond
  modified_base 23: mod_base = OTHER; note = 2'-O-methoxy nucleoside
agtcagggtccagccctcctcgc

SEQ ID NO: 294 - RNA, 23 nt, synthetic construct
  source 1..23: mol_type = other RNA
  modified_base 1: mod_base = OTHER; note = 2'-O-methoxy nucleoside with phosphorothioate bond
  modified_base 2: mod_base = OTHER; note = 2'-fluoro nucleoside with phosphorothioate bond
  modified_base 3: mod_base = OTHER; note = 2'-O-methoxy nucleoside
  modified_base 4: mod_base = OTHER; note = 2'-fluoro nucleoside
  modified_base 5: mod_base = OTHER; note = 2'-O-methoxy nucleoside
  modified_base 6: mod_base = OTHER; note = 2'-fluoro nucleoside
  modified_base 7: mod_base = OTHER; note = 2'-O-methoxy nucleoside
  modified_base 8: mod_base = OTHER; note = 2'-fluoro nucleoside
  modified_base 9: mod_base = OTHER; note = 2'-O-methoxy nucleoside
  modified_base 10: mod_base = OTHER; note = 2'-fluoro nucleoside
  modified_base 11: mod_base = OTHER; note = 2'-O-methoxy nucleoside
  modified_base 12: mod_base = OTHER; note = 2'-fluoro nucleoside
  modified_base 13: mod_base = OTHER; note = 2'-O-methoxy nucleoside
  modified_base 14: mod_base = OTHER; note = 2'-fluoro nucleoside
  modified_base 15: mod_base = OTHER; note = 2'-O-methoxy nucleoside
  modified_base 16: mod_base = OTHER; note = 2'-fluoro nucleoside
  modified_base 17: mod_base = OTHER; note = 2'-O-methoxy nucleoside
  modified_base 18: mod_base = OTHER; note = 2'-fluoro nucleoside
  modified_base 19: mod_base = OTHER; note = 2'-O-methoxy nucleoside
  modified_base 20: mod_base = OTHER; note = 2'-fluoro nucleoside
  modified_base 21: mod_base = OTHER; note = 2'-O-methoxy nucleoside with phosphorothioate bond
  modified_base 22: mod_base = OTHER; note = 2'-fluoro nucleoside with phosphorothioate bond
  modified_base 23: mod_base = OTHER; note = 2'-O-methoxy nucleoside
tcccagggagggcactgcagcca

SEQ ID NO: 295 - RNA, 23 nt, synthetic construct
  source 1..23: mol_type = other RNA
  modified_base 1: mod_base = OTHER; note = 2'-O-methoxy nucleoside with phosphorothioate bond
  modified_base 2: mod_base = OTHER; note = 2'-fluoro nucleoside with phosphorothioate bond
  modified_base 3: mod_base = OTHER; note = 2'-O-methoxy nucleoside
  modified_base 4: mod_base = OTHER; note = 2'-fluoro nucleoside
  modified_base 5: mod_base = OTHER; note = 2'-O-methoxy nucleoside
  modified_base 6: mod_base = OTHER; note = 2'-fluoro nucleoside
  modified_base 7: mod_base = OTHER; note = 2'-O-methoxy nucleoside
  modified_base 8: mod_base = OTHER; note = 2'-fluoro nucleoside
  modified_base 9: mod_base = OTHER; note = 2'-O-methoxy nucleoside
  modified_base 10: mod_base = OTHER; note = 2'-fluoro nucleoside
  modified_base 11: mod_base = OTHER; note = 2'-O-methoxy nucleoside
  modified_base 12: mod_base = OTHER; note = 2'-fluoro nucleoside
  modified_base 13: mod_base = OTHER; note = 2'-O-methoxy nucleoside
  modified_base 14: mod_base = OTHER; note = 2'-fluoro nucleoside
  modified_base 15: mod_base = OTHER; note = 2'-O-methoxy nucleoside
  modified_base 16: mod_base = OTHER; note = 2'-fluoro nucleoside
  modified_base 17: mod_base = OTHER; note = 2'-O-methoxy nucleoside
  modified_base 18: mod_base = OTHER; note = 2'-fluoro nucleoside
  modified_base 19: mod_base = OTHER; note = 2'-O-methoxy nucleoside
  modified_base 20: mod_base = OTHER; note = 2'-fluoro nucleoside
  modified_base 21: mod_base = OTHER; note = 2'-O-methoxy nucleoside with phosphorothioate bond
  modified_base 22: mod_base = OTHER; note = 2'-fluoro nucleoside with phosphorothioate bond
  modified_base 23: mod_base = OTHER; note = 2'-O-methoxy nucleoside
acgtgggaggtcccagggagggc

SEQ ID NO: 296 - RNA, 23 nt, synthetic construct
  source 1..23: mol_type = other RNA
  modified_base 1: mod_base = OTHER; note = 2'-O-methoxy nucleoside with phosphorothioate bond
  modified_base 2: mod_base = OTHER; note = 2'-fluoro nucleoside with phosphorothioate bond
  modified_base 3: mod_base = OTHER; note = 2'-O-methoxy nucleoside
  modified_base 4: mod_base = OTHER; note = 2'-fluoro nucleoside
  modified_base 5: mod_base = OTHER; note = 2'-O-methoxy nucleoside
  modified_base 6: mod_base = OTHER; note = 2'-fluoro nucleoside
  modified_base 7: mod_base = OTHER; note = 2'-O-methoxy nucleoside
  modified_base 8: mod_base = OTHER; note = 2'-fluoro nucleoside
  modified_base 9: mod_base = OTHER; note = 2'-O-methoxy nucleoside
  modified_base 10: mod_base = OTHER; note = 2'-fluoro nucleoside
  modified_base 11: mod_base = OTHER; note = 2'-O-methoxy nucleoside
  modified_base 12: mod_base = OTHER; note = 2'-fluoro nucleoside
  modified_base 13: mod_base = OTHER; note = 2'-O-methoxy nucleoside
  modified_base 14: mod_base = OTHER; note = 2'-fluoro nucleoside
  modified_base 15: mod_base = OTHER; note = 2'-O-methoxy nucleoside
  modified_base 16: mod_base = OTHER; note = 2'-fluoro nucleoside
  modified_base 17: mod_base = OTHER; note = 2'-O-methoxy nucleoside
  modified_base 18: mod_base = OTHER; note = 2'-fluoro nucleoside
  modified_base 19: mod_base = OTHER; note = 2'-O-methoxy nucleoside
  modified_base 20: mod_base = OTHER; note = 2'-fluoro nucleoside
  modified_base 21: mod_base = OTHER; note = 2'-O-methoxy nucleoside with phosphorothioate bond
  modified_base 22: mod_base = OTHER; note = 2'-fluoro nucleoside with phosphorothioate bond
  modified_base 23: mod_base = OTHER; note = 2'-O-methoxy nucleoside
aggacgtgggaggtcccagggag

SEQ ID NO: 297 - RNA, 23 nt, synthetic construct
  source 1..23: mol_type = other RNA
  modified_base 1: mod_base = OTHER; note = 2'-O-methoxy nucleoside with phosphorothioate bond
  modified_base 2: mod_base = OTHER; note = 2'-fluoro nucleoside with phosphorothioate bond
  modified_base 3: mod_base = OTHER; note = 2'-O-methoxy nucleoside
  modified_base 4: mod_base = OTHER; note = 2'-fluoro nucleoside
  modified_base 5: mod_base = OTHER; note = 2'-O-methoxy nucleoside
  modified_base 6: mod_base = OTHER; note = 2'-fluoro nucleoside
  modified_base 7: mod_base = OTHER; note = 2'-O-methoxy nucleoside
  modified_base 8: mod_base = OTHER; note = 2'-fluoro nucleoside
  modified_base 9: mod_base = OTHER; note = 2'-O-methoxy nucleoside
  modified_base 10: mod_base = OTHER; note = 2'-fluoro nucleoside
  modified_base 11: mod_base = OTHER; note = 2'-O-methoxy nucleoside
  modified_base 12: mod_base = OTHER; note = 2'-fluoro nucleoside
  modified_base 13: mod_base = OTHER; note = 2'-O-methoxy nucleoside
  modified_base 14: mod_base = OTHER; note = 2'-fluoro nucleoside
  modified_base 15: mod_base = OTHER; note = 2'-O-methoxy nucleoside
  modified_base 16: mod_base = OTHER; note = 2'-fluoro nucleoside
  modified_base 17: mod_base = OTHER; note = 2'-O-methoxy nucleoside
  modified_base 18: mod_base = OTHER; note = 2'-fluoro nucleoside
  modified_base 19: mod_base = OTHER; note = 2'-O-methoxy nucleoside
  modified_base 20: mod_base = OTHER; note = 2'-fluoro nucleoside
  modified_base 21: mod_base = OTHER; note = 2'-O-methoxy nucleoside with phosphorothioate bond
  modified_base 22: mod_base = OTHER; note = 2'-fluoro nucleoside with phosphorothioate bond
  modified_base 23: mod_base = OTHER; note = 2'-O-methoxy nucleoside
tgttgtctacggcgtaggccccc

SEQ ID NO: 298 - RNA, 23 nt, synthetic construct
  source 1..23: mol_type = other RNA
  modified_base 1: mod_base = OTHER; note = 2'-O-methoxy nucleoside with phosphorothioate bond
  modified_base 2: mod_base = OTHER; note = 2'-fluoro nucleoside with phosphorothioate bond
  modified_base 3: mod_base = OTHER; note = 2'-O-methoxy nucleoside
  modified_base 4: mod_base = OTHER; note = 2'-fluoro nucleoside
  modified_base 5: mod_base = OTHER; note = 2'-O-methoxy nucleoside
  modified_base 6: mod_base = OTHER; note = 2'-fluoro nucleoside
  modified_base 7: mod_base = OTHER; note = 2'-O-methoxy nucleoside
  modified_base 8: mod_base = OTHER; note = 2'-fluoro nucleoside
  modified_base 9: mod_base = OTHER; note = 2'-O-methoxy nucleoside
  modified_base 10: mod_base = OTHER; note = 2'-fluoro nucleoside
  modified_base 11: mod_base = OTHER; note = 2'-O-methoxy nucleoside
  modified_base 12: mod_base = OTHER; note = 2'-fluoro nucleoside
  modified_base 13: mod_base = OTHER; note = 2'-O-methoxy nucleoside
  modified_base 14: mod_base = OTHER; note = 2'-fluoro nucleoside
  modified_base 15: mod_base = OTHER; note = 2'-O-methoxy nucleoside
  modified_base 16: mod_base = OTHER; note = 2'-fluoro nucleoside
  modified_base 17: mod_base = OTHER; note = 2'-O-methoxy nucleoside
  modified_base 18: mod_base = OTHER; note = 2'-fluoro nucleoside
  modified_base 19: mod_base = OTHER; note = 2'-O-methoxy nucleoside
  modified_base 20: mod_base = OTHER; note = 2'-fluoro nucleoside
  modified_base 21: mod_base = OTHER; note = 2'-O-methoxy nucleoside with phosphorothioate bond
  modified_base 22: mod_base = OTHER; note = 2'-fluoro nucleoside with phosphorothioate bond
  modified_base 23: mod_base = OTHER; note = 2'-O-methoxy nucleoside
tacacacgtgttgtctacggcgt

SEQ ID NO: 299 - RNA, 23 nt, synthetic construct
  source 1..23: mol_type = other RNA
  modified_base 1: mod_base = OTHER; note = 2'-O-methoxy nucleoside with phosphorothioate bond
  modified_base 2: mod_base = OTHER; note = 2'-fluoro nucleoside with phosphorothioate bond
  modified_base 3: mod_base = OTHER; note = 2'-O-methoxy nucleoside
  modified_base 4: mod_base = OTHER; note = 2'-fluoro nucleoside
  modified_base 5: mod_base = OTHER; note = 2'-O-methoxy nucleoside
  modified_base 6: mod_base = OTHER; note = 2'-fluoro nucleoside
  modified_base 7: mod_base = OTHER; note = 2'-O-methoxy nucleoside
  modified_base 8: mod_base = OTHER; note = 2'-fluoro nucleoside
  modified_base 9: mod_base = OTHER; note = 2'-O-methoxy nucleoside
  modified_base 10: mod_base = OTHER; note = 2'-fluoro nucleoside
  modified_base 11: mod_base = OTHER; note = 2'-O-methoxy nucleoside
  modified_base 12: mod_base = OTHER; note = 2'-fluoro nucleoside
  modified_base 13: mod_base = OTHER; note = 2'-O-methoxy nucleoside
  modified_base 14: mod_base = OTHER; note = 2'-fluoro nucleoside
  modified_base 15: mod_base = OTHER; note = 2'-O-methoxy nucleoside
  modified_base 16: mod_base = OTHER; note = 2'-fluoro nucleoside
  modified_base 17: mod_base = OTHER; note = 2'-O-methoxy nucleoside
  modified_base 18: mod_base = OTHER; note = 2'-fluoro nucleoside
  modified_base 19: mod_base = OTHER; note = 2'-O-methoxy nucleoside
  modified_base 20: mod_base = OTHER; note = 2'-fluoro nucleoside
  modified_base 21: mod_base = OTHER; note = 2'-O-methoxy nucleoside with phosphorothioate bond
  modified_base 22: mod_base = OTHER; note = 2'-fluoro nucleoside with phosphorothioate bond
  modified_base 23: mod_base = OTHER; note = 2'-O-methoxy nucleoside
ctacacacgtgttgtctacggcg

SEQ ID NO: 300 - RNA, 23 nt, synthetic construct
  source 1..23: mol_type = other RNA
  modified_base 1: mod_base = OTHER; note = 2'-O-methoxy nucleoside with phosphorothioate bond
  modified_base 2: mod_base = OTHER; note = 2'-fluoro nucleoside with phosphorothioate bond
  modified_base 3: mod_base = OTHER; note = 2'-O-methoxy nucleoside
  modified_base 4: mod_base = OTHER; note = 2'-fluoro nucleoside
  modified_base 5: mod_base = OTHER; note = 2'-O-methoxy nucleoside
  modified_base 6: mod_base = OTHER; note = 2'-fluoro nucleoside
  modified_base 7: mod_base = OTHER; note = 2'-O-methoxy nucleoside
  modified_base 8: mod_base = OTHER; note = 2'-fluoro nucleoside
  modified_base 9: mod_base = OTHER; note = 2'-O-methoxy nucleoside
  modified_base 10: mod_base = OTHER; note = 2'-fluoro nucleoside
  modified_base 11: mod_base = OTHER; note = 2'-O-methoxy nucleoside
  modified_base 12: mod_base = OTHER; note = 2'-fluoro nucleoside
  modified_base 13: mod_base = OTHER; note = 2'-O-methoxy nucleoside
  modified_base 14: mod_base = OTHER; note = 2'-fluoro nucleoside
  modified_base 15: mod_base = OTHER; note = 2'-O-methoxy nucleoside
  modified_base 16: mod_base = OTHER; note = 2'-fluoro nucleoside
  modified_base 17: mod_base = OTHER; note = 2'-O-methoxy nucleoside
  modified_base 18: mod_base = OTHER; note = 2'-fluoro nucleoside
  modified_base 19: mod_base = OTHER; note = 2'-O-methoxy nucleoside
  modified_base 20: mod_base = OTHER; note = 2'-fluoro nucleoside
  modified_base 21: mod_base = OTHER; note = 2'-O-methoxy nucleoside with phosphorothioate bond
  modified_base 22: mod_base = OTHER; note = 2'-fluoro nucleoside with phosphorothioate bond
  modified_base 23: mod_base = OTHER; note = 2'-O-methoxy nucleoside
tgactacacacgtgttgtctacg

SEQ ID NO: 301 - RNA, 23 nt, synthetic construct
  source 1..23: mol_type = other RNA
  modified_base 1: mod_base = OTHER; note = 2'-O-methoxy nucleoside with phosphorothioate bond
  modified_base 2: mod_base = OTHER; note = 2'-fluoro nucleoside with phosphorothioate bond
  modified_base 3: mod_base = OTHER; note = 2'-O-methoxy nucleoside
  modified_base 4: mod_base = OTHER; note = 2'-fluoro nucleoside
  modified_base 5: mod_base = OTHER; note = 2'-O-methoxy nucleoside
  modified_base 6: mod_base = OTHER; note = 2'-fluoro nucleoside
  modified_base 7: mod_base = OTHER; note = 2'-O-methoxy nucleoside
  modified_base 8: mod_base = OTHER; note = 2'-fluoro nucleoside
  modified_base 9: mod_base = OTHER; note = 2'-O-methoxy nucleoside
  modified_base 10: mod_base = OTHER; note = 2'-fluoro nucleoside
  modified_base 11: mod_base = OTHER; note = 2'-O-methoxy nucleoside
  modified_base 12: mod_base = OTHER; note = 2'-fluoro nucleoside
  modified_base 13: mod_base = OTHER; note = 2'-O-methoxy nucleoside
  modified_base 14: mod_base = OTHER; note = 2'-fluoro nucleoside
  modified_base 15: mod_base = OTHER; note = 2'-O-methoxy nucleoside
  modified_base 16: mod_base = OTHER; note = 2'-fluoro nucleoside
  modified_base 17: mod_base = OTHER; note = 2'-O-methoxy nucleoside
  modified_base 18: mod_base = OTHER; note = 2'-fluoro nucleoside
  modified_base 19: mod_base = OTHER; note = 2'-O-methoxy nucleoside
  modified_base 20: mod_base = OTHER; note = 2'-fluoro nucleoside
  modified_base 21: mod_base = OTHER; note = 2'-O-methoxy nucleoside with phosphorothioate bond
  modified_base 22: mod_base = OTHER; note = 2'-fluoro nucleoside with phosphorothioate bond
  modified_base 23: mod_base = OTHER; note = 2'-O-methoxy nucleoside
tcccggctcctgactacacacgt

SEQ ID NO: 302 - RNA, 23 nt, synthetic construct
  source 1..23: mol_type = other RNA
  modified_base 1: mod_base = OTHER; note = 2'-O-methoxy nucleoside with phosphorothioate bond
  modified_base 2: mod_base = OTHER; note = 2'-fluoro nucleoside with phosphorothioate bond
  modified_base 3: mod_base = OTHER; note = 2'-O-methoxy nucleoside
  modified_base 4: mod_base = OTHER; note = 2'-fluoro nucleoside
  modified_base 5: mod_base = OTHER; note = 2'-O-methoxy nucleoside
  modified_base 6: mod_base = OTHER; note = 2'-fluoro nucleoside
  modified_base 7: mod_base = OTHER; note = 2'-O-methoxy nucleoside
  modified_base 8: mod_base = OTHER; note = 2'-fluoro nucleoside
  modified_base 9: mod_base = OTHER; note = 2'-O-methoxy nucleoside
  modified_base 10: mod_base = OTHER; note = 2'-fluoro nucleoside
  modified_base 11: mod_base = OTHER; note = 2'-O-methoxy nucleoside
  modified_base 12: mod_base = OTHER; note = 2'-fluoro nucleoside
  modified_base 13: mod_base = OTHER; note = 2'-O-methoxy nucleoside
  modified_base 14: mod_base = OTHER; note = 2'-fluoro nucleoside
  modified_base 15: mod_base = OTHER; note = 2'-O-methoxy nucleoside
  modified_base 16: mod_base = OTHER; note = 2'-fluoro nucleoside
  modified_base 17: mod_base = OTHER; note = 2'-O-methoxy nucleoside
  modified_base 18: mod_base = OTHER; note = 2'-fluoro nucleoside
  modified_base 19: mod_base = OTHER; note = 2'-O-methoxy nucleoside
  modified_base 20: mod_base = OTHER; note = 2'-fluoro nucleoside
  modified_base 21: mod_base = OTHER; note = 2'-O-methoxy nucleoside with phosphorothioate bond
  modified_base 22: mod_base = OTHER; note = 2'-fluoro nucleoside with phosphorothioate bond
  modified_base 23: mod_base = OTHER; note = 2'-O-methoxy nucleoside
gtagtgctgacgtcccggctcct

SEQ ID NO: 303 - RNA, 23 nt, synthetic construct
  source 1..23: mol_type = other RNA
  modified_base 1: mod_base = OTHER; note = 2'-O-methoxy nucleoside with phosphorothioate bond
  modified_base 2: mod_base = OTHER; note = 2'-fluoro nucleoside with phosphorothioate bond
  modified_base 3: mod_base = OTHER; note = 2'-O-methoxy nucleoside
  modified_base 4: mod_base = OTHER; note = 2'-fluoro nucleoside
  modified_base 5: mod_base = OTHER; note = 2'-O-methoxy nucleoside
  modified_base 6: mod_base = OTHER; note = 2'-fluoro nucleoside
  modified_base 7: mod_base = OTHER; note = 2'-O-methoxy nucleoside
  modified_base 8: mod_base = OTHER; note = 2'-fluoro nucleoside
  modified_base 9: mod_base = OTHER; note = 2'-O-methoxy nucleoside
  modified_base 10: mod_base = OTHER; note = 2'-fluoro nucleoside
  modified_base 11: mod_base = OTHER; note = 2'-O-methoxy nucleoside
  modified_base 12: mod_base = OTHER; note = 2'-fluoro nucleoside
  modified_base 13: mod_base = OTHER; note = 2'-O-methoxy nucleoside
  modified_base 14: mod_base = OTHER; note = 2'-fluoro nucleoside
  modified_base 15: mod_base = OTHER; note = 2'-O-methoxy nucleoside
  modified_base 16: mod_base = OTHER; note = 2'-fluoro nucleoside
  modified_base 17: mod_base = OTHER; note = 2'-O-methoxy nucleoside
  modified_base 18: mod_base = OTHER; note = 2'-fluoro nucleoside
  modified_base 19: mod_base = OTHER; note = 2'-O-methoxy nucleoside
  modified_base 20: mod_base = OTHER; note = 2'-fluoro nucleoside
  modified_base 21: mod_base = OTHER; note = 2'-O-methoxy nucleoside with phosphorothioate bond
  modified_base 22: mod_base = OTHER; note = 2'-fluoro nucleoside with phosphorothioate bond
  modified_base 23: mod_base = OTHER; note = 2'-O-methoxy nucleoside
tggtgctgcctgtagtgctgacg

SEQ ID NO: 304 - RNA, 23 nt, synthetic construct
  source 1..23: mol_type = other RNA
  modified_base 1: mod_base = OTHER; note = 2'-O-methoxy nucleoside with phosphorothioate bond
  modified_base 2: mod_base = OTHER; note = 2'-fluoro nucleoside with phosphorothioate bond
  modified_base 3: mod_base = OTHER; note = 2'-O-methoxy nucleoside
  modified_base 4: mod_base = OTHER; note = 2'-fluoro nucleoside
  modified_base 5: mod_base = OTHER; note = 2'-O-methoxy nucleoside
  modified_base 6: mod_base = OTHER; note = 2'-fluoro nucleoside
  modified_base 7: mod_base = OTHER; note = 2'-O-methoxy nucleoside
  modified_base 8: mod_base = OTHER; note = 2'-fluoro nucleoside
  modified_base 9: mod_base = OTHER; note = 2'-O-methoxy nucleoside
  modified_base 10: mod_base = OTHER; note = 2'-fluoro nucleoside
  modified_base 11: mod_base = OTHER; note = 2'-O-methoxy nucleoside
  modified_base 12: mod_base = OTHER; note = 2'-fluoro nucleoside
  modified_base 13: mod_base = OTHER; note = 2'-O-methoxy nucleoside
  modified_base 14: mod_base = OTHER; note = 2'-fluoro nucleoside
  modified_base 15: mod_base = OTHER; note = 2'-O-methoxy nucleoside
  modified_base 16: mod_base = OTHER; note = 2'-fluoro nucleoside
  modified_base 17: mod_base = OTHER; note = 2'-O-methoxy nucleoside
  modified_base 18: mod_base = OTHER; note = 2'-fluoro nucleoside
  modified_base 19: mod_base = OTHER; note = 2'-O-methoxy nucleoside
  modified_base 20: mod_base = OTHER; note = 2'-fluoro nucleoside
  modified_base 21: mod_base = OTHER; note = 2'-O-methoxy nucleoside with phosphorothioate bond
  modified_base 22: mod_base = OTHER; note = 2'-fluoro nucleoside with phosphorothioate bond
  modified_base 23: mod_base = OTHER; note = 2'-O-methoxy nucleoside
ttctccacagttagctggagatg

SEQ ID NO: 305 - RNA, 23 nt, synthetic construct
  source 1..23: mol_type = other RNA
  modified_base 1: mod_base = OTHER; note = 2'-O-methoxy nucleoside with phosphorothioate bond
  modified_base 2: mod_base = OTHER; note = 2'-fluoro nucleoside with phosphorothioate bond
  modified_base 3: mod_base = OTHER; note = 2'-O-methoxy nucleoside
  modified_base 4: mod_base = OTHER; note = 2'-fluoro nucleoside
  modified_base 5: mod_base = OTHER; note = 2'-O-methoxy nucleoside
  modified_base 6: mod_base = OTHER; note = 2'-fluoro nucleoside
  modified_base 7: mod_base = OTHER; note = 2'-O-methoxy nucleoside
  modified_base 8: mod_base = OTHER; note = 2'-fluoro nucleoside
  modified_base 9: mod_base = OTHER; note = 2'-O-methoxy nucleoside
  modified_base 10: mod_base = OTHER; note = 2'-fluoro nucleoside
  modified_base 11: mod_base = OTHER; note = 2'-O-methoxy nucleoside
  modified_base 12: mod_base = OTHER; note = 2'-fluoro nucleoside
  modified_base 13: mod_base = OTHER; note = 2'-O-methoxy nucleoside
  modified_base 14: mod_base = OTHER; note = 2'-fluoro nucleoside
  modified_base 15: mod_base = OTHER; note = 2'-O-methoxy nucleoside
  modified_base 16: mod_base = OTHER; note = 2'-fluoro nucleoside
  modified_base 17: mod_base = OTHER; note = 2'-O-methoxy nucleoside
  modified_base 18: mod_base = OTHER; note = 2'-fluoro nucleoside
  modified_base 19: mod_base = OTHER; note = 2'-O-methoxy nucleoside
  modified_base 20: mod_base = OTHER; note = 2'-fluoro nucleoside
  modified_base 21: mod_base = OTHER; note = 2'-O-methoxy nucleoside with phosphorothioate bond
  modified_base 22: mod_base = OTHER; note = 2'-fluoro nucleoside with phosphorothioate bond
  modified_base 23: mod_base = OTHER; note = 2'-O-methoxy nucleoside
agcctccattaatcagggagccc

SEQ ID NO: 306 - RNA, 23 nt, synthetic construct
  source 1..23: mol_type = other RNA
  modified_base 1: mod_base = OTHER; note = 2'-O-methoxy nucleoside with phosphorothioate bond
  modified_base 2: mod_base = OTHER; note = 2'-fluoro nucleoside with phosphorothioate bond
  modified_base 3: mod_base = OTHER; note = 2'-O-methoxy nucleoside
  modified_base 4: mod_base = OTHER; note = 2'-fluoro nucleoside
  modified_base 5: mod_base = OTHER; note = 2'-O-methoxy nucleoside
  modified_base 6: mod_base = OTHER; note = 2'-fluoro nucleoside
  modified_base 7: mod_base = OTHER; note = 2'-O-methoxy nucleoside
  modified_base 8: mod_base = OTHER; note = 2'-fluoro nucleoside
  modified_base 9: mod_base = OTHER; note = 2'-O-methoxy nucleoside
  modified_base 10: mod_base = OTHER; note = 2'-fluoro nucleoside
  modified_base 11: mod_base = OTHER; note = 2'-O-methoxy nucleoside
  modified_base 12: mod_base = OTHER; note = 2'-fluoro nucleoside
  modified_base 13: mod_base = OTHER; note = 2'-O-methoxy nucleoside
  modified_base 14: mod_base = OTHER; note = 2'-fluoro nucleoside
  modified_base 15: mod_base = OTHER; note = 2'-O-methoxy nucleoside
  modified_base 16: mod_base = OTHER; note = 2'-fluoro nucleoside
  modified_base 17: mod_base = OTHER; note = 2'-O-methoxy nucleoside
  modified_base 18: mod_base = OTHER; note = 2'-fluoro nucleoside
  modified_base 19: mod_base = OTHER; note = 2'-O-methoxy nucleoside
  modified_base 20: mod_base = OTHER; note = 2'-fluoro nucleoside
  modified_base 21: mod_base = OTHER; note = 2'-O-methoxy nucleoside with phosphorothioate bond
  modified_base 22: mod_base = OTHER; note = 2'-fluoro nucleoside with phosphorothioate bond
  modified_base 23: mod_base = OTHER; note = 2'-O-methoxy nucleoside
taagcctccattaatcagggagc

SEQ ID NO: 307 - RNA, 23 nt, synthetic construct
  source 1..23: mol_type = other RNA
  modified_base 1: mod_base = OTHER; note = 2'-O-methoxy nucleoside with phosphorothioate bond
  modified_base 2: mod_base = OTHER; note = 2'-fluoro nucleoside with phosphorothioate bond
  modified_base 3: mod_base = OTHER; note = 2'-O-methoxy nucleoside
  modified_base 4: mod_base = OTHER; note = 2'-fluoro nucleoside
  modified_base 5: mod_base = OTHER; note = 2'-O-methoxy nucleoside
  modified_base 6: mod_base = OTHER; note = 2'-fluoro nucleoside
  modified_base 7: mod_base = OTHER; note = 2'-O-methoxy nucleoside
  modified_base 8: mod_base = OTHER; note = 2'-fluoro nucleoside
  modified_base 9: mod_base = OTHER; note = 2'-O-methoxy nucleoside
  modified_base 10: mod_base = OTHER; note = 2'-fluoro nucleoside
  modified_base 11: mod_base = OTHER; note = 2'-O-methoxy nucleoside
  modified_base 12: mod_base = OTHER; note = 2'-fluoro nucleoside
  modified_base 13: mod_base = OTHER; note = 2'-O-methoxy nucleoside
  modified_base 14: mod_base = OTHER; note = 2'-fluoro nucleoside
  modified_base 15: mod_base = OTHER; note = 2'-O-methoxy nucleoside
  modified_base 16: mod_base = OTHER; note = 2'-fluoro nucleoside
  modified_base 17: mod_base = OTHER; note = 2'-O-methoxy nucleoside
  modified_base 18: mod_base = OTHER; note = 2'-fluoro nucleoside
  modified_base 19: mod_base = OTHER; note = 2'-O-methoxy nucleoside
  modified_base 20: mod_base = OTHER; note = 2'-fluoro nucleoside
  modified_base 21: mod_base = OTHER; note = 2'-O-methoxy nucleoside with phosphorothioate bond
  modified_base 22: mod_base = OTHER; note = 2'-fluoro nucleoside with phosphorothioate bond
  modified_base 23: mod_base = OTHER; note = 2'-O-methoxy nucleoside
gctaagcctccattaatcaggga

SEQ ID NO: 308 - RNA, 23 nt, synthetic construct
  source 1..23: mol_type = other RNA
  modified_base 1: mod_base = OTHER; note = 2'-O-methoxy nucleoside with phosphorothioate bond
  modified_base 2: mod_base = OTHER; note = 2'-fluoro nucleoside with phosphorothioate bond
  modified_base 3: mod_base = OTHER; note = 2'-O-methoxy nucleoside
  modified_base 4: mod_base = OTHER; note = 2'-fluoro nucleoside
  modified_base 5: mod_base = OTHER; note = 2'-O-methoxy nucleoside
  modified_base 6: mod_base = OTHER; note = 2'-fluoro nucleoside
  modified_base 7: mod_base = OTHER; note = 2'-O-methoxy nucleoside
  modified_base 8: mod_base = OTHER; note = 2'-fluoro nucleoside
  modified_base 9: mod_base = OTHER; note = 2'-O-methoxy nucleoside
  modified_base 10: mod_base = OTHER; note = 2'-fluoro nucleoside
  modified_base 11: mod_base = OTHER; note = 2'-O-methoxy nucleoside
  modified_base 12: mod_base = OTHER; note = 2'-fluoro nucleoside
  modified_base 13: mod_base = OTHER; note = 2'-O-methoxy nucleoside
  modified_base 14: mod_base = OTHER; note = 2'-fluoro nucleoside
  modified_base 15: mod_base = OTHER; note = 2'-O-methoxy nucleoside
  modified_base 16: mod_base = OTHER; note = 2'-fluoro nucleoside
  modified_base 17: mod_base = OTHER; note = 2'-O-methoxy nucleoside
  modified_base 18: mod_base = OTHER; note = 2'-fluoro nucleoside
  modified_base 19: mod_base = OTHER; note = 2'-O-methoxy nucleoside
  modified_base 20: mod_base = OTHER; note = 2'-fluoro nucleoside
  modified_base 21: mod_base = OTHER; note = 2'-O-methoxy nucleoside with phosphorothioate bond
  modified_base 22: mod_base = OTHER; note = 2'-fluoro nucleoside with phosphorothioate bond
  modified_base 23: mod_base = OTHER; note = 2'-O-methoxy nucleoside
aaagctaagcctccattaatcag

SEQ ID NO: 309 - RNA, 23 nt, synthetic construct
  source 1..23: mol_type = other RNA
  modified_base 1: mod_base = OTHER; note = 2'-O-methoxy nucleoside with phosphorothioate bond
  modified_base 2: mod_base = OTHER; note = 2'-fluoro nucleoside with phosphorothioate bond
  modified_base 3: mod_base = OTHER; note = 2'-O-methoxy nucleoside
  modified_base 4: mod_base = OTHER; note = 2'-fluoro nucleoside
  modified_base 5: mod_base = OTHER; note = 2'-O-methoxy nucleoside
  modified_base 6: mod_base = OTHER; note = 2'-fluoro nucleoside
  modified_base 7: mod_base = OTHER; note = 2'-O-methoxy nucleoside
  modified_base 8: mod_base = OTHER; note = 2'-fluoro nucleoside
  modified_base 9: mod_base = OTHER; note = 2'-O-methoxy nucleoside
  modified_base 10: mod_base = OTHER; note = 2'-fluoro nucleoside
  modified_base 11: mod_base = OTHER; note = 2'-O-methoxy nucleoside
  modified_base 12: mod_base = OTHER; note = 2'-fluoro nucleoside
  modified_base 13: mod_base = OTHER; note = 2'-O-methoxy nucleoside
  modified_base 14: mod_base = OTHER; note = 2'-fluoro nucleoside
  modified_base 15: mod_base = OTHER; note = 2'-O-methoxy nucleoside
  modified_base 16: mod_base = OTHER; note = 2'-fluoro nucleoside
  modified_base 17: mod_base = OTHER; note = 2'-O-methoxy nucleoside
  modified_base 18: mod_base = OTHER; note = 2'-fluoro nucleoside
  modified_base 19: mod_base = OTHER; note = 2'-O-methoxy nucleoside
  modified_base 20: mod_base = OTHER; note = 2'-fluoro nucleoside
  modified_base 21: mod_base = OTHER; note = 2'-O-methoxy nucleoside with phosphorothioate bond
  modified_base 22: mod_base = OTHER; note = 2'-fluoro nucleoside with phosphorothioate bond
  modified_base 23: mod_base = OTHER; note = 2'-O-methoxy nucleoside
aaggcacagcctgtgaccaccag

SEQ ID NO: 310 - RNA, 23 nt, synthetic construct
  source 1..23: mol_type = other RNA
  modified_base 1: mod_base = OTHER; note = 2'-O-methoxy nucleoside with phosphorothioate bond
  modified_base 2: mod_base = OTHER; note = 2'-fluoro nucleoside with phosphorothioate bond
  modified_base 3: mod_base = OTHER; note = 2'-O-methoxy nucleoside
  modified_base 4: mod_base = OTHER; note = 2'-fluoro nucleoside
  modified_base 5: mod_base = OTHER; note = 2'-O-methoxy nucleoside
  modified_base 6: mod_base = OTHER; note = 2'-fluoro nucleoside
  modified_base 7: mod_base = OTHER; note = 2'-O-methoxy nucleoside
  modified_base 8: mod_base = OTHER; note = 2'-fluoro nucleoside
  modified_base 9: mod_base = OTHER; note = 2'-O-methoxy nucleoside
  modified_base 10: mod_base = OTHER; note = 2'-fluoro nucleoside
  modified_base 11: mod_base = OTHER; note = 2'-O-methoxy nucleoside
  modified_base 12: mod_base = OTHER; note = 2'-fluoro nucleoside
  modified_base 13: mod_base = OTHER; note = 2'-O-methoxy nucleoside
  modified_base 14: mod_base = OTHER; note = 2'-fluoro nucleoside
  modified_base 15: mod_base = OTHER; note = 2'-O-methoxy nucleoside
  modified_base 16: mod_base = OTHER; note = 2'-fluoro nucleoside
  modified_base 17: mod_base = OTHER; note = 2'-O-methoxy nucleoside
  modified_base 18: mod_base = OTHER; note = 2'-fluoro nucleoside
  modified_base 19: mod_base = OTHER; note = 2'-O-methoxy nucleoside
  modified_base 20: mod_base = OTHER; note = 2'-fluoro nucleoside
  modified_base 21: mod_base = OTHER; note = 2'-O-methoxy nucleoside with phosphorothioate bond
  modified_base 22: mod_base = OTHER; note = 2'-fluoro nucleoside with phosphorothioate bond
  modified_base 23: mod_base = OTHER; note = 2'-O-methoxy nucleoside
aaaccaaggcacagcctgtgacc

SEQ ID NO: 311 - RNA, 23 nt, synthetic construct
  source 1..23: mol_type = other RNA
  modified_base 1: mod_base = OTHER; note = 2'-O-methoxy nucleoside with phosphorothioate bond
  modified_base 2: mod_base = OTHER; note = 2'-fluoro nucleoside with phosphorothioate bond
  modified_base 3: mod_base = OTHER; note = 2'-O-methoxy nucleoside
  modified_base 4: mod_base = OTHER; note = 2'-fluoro nucleoside
  modified_base 5: mod_base = OTHER; note = 2'-O-methoxy nucleoside
  modified_base 6: mod_base = OTHER; note = 2'-fluoro nucleoside
  modified_base 7: mod_base = OTHER; note = 2'-O-methoxy nucleoside
  modified_base 8: mod_base = OTHER; note = 2'-fluoro nucleoside
  modified_base 9: mod_base = OTHER; note = 2'-O-methoxy nucleoside
  modified_base 10: mod_base = OTHER; note = 2'-fluoro nucleoside
  modified_base 11: mod_base = OTHER; note = 2'-O-methoxy nucleoside
  modified_base 12: mod_base = OTHER; note = 2'-fluoro nucleoside
  modified_base 13: mod_base = OTHER; note = 2'-O-methoxy nucleoside
  modified_base 14: mod_base = OTHER; note = 2'-fluoro nucleoside
  modified_base 15: mod_base = OTHER; note = 2'-O-methoxy nucleoside
  modified_base 16: mod_base = OTHER; note = 2'-fluoro nucleoside
  modified_base 17: mod_base = OTHER; note = 2'-O-methoxy nucleoside
  modified_base 18: mod_base = OTHER; note = 2'-fluoro nucleoside
  modified_base 19: mod_base = OTHER; note = 2'-O-methoxy nucleoside
  modified_base 20: mod_base = OTHER; note = 2'-fluoro nucleoside
  modified_base 21: mod_base = OTHER; note = 2'-O-methoxy nucleoside with phosphorothioate bond
  modified_base 22: mod_base = OTHER; note = 2'-fluoro nucleoside with phosphorothioate bond
  modified_base 23: mod_base = OTHER; note = 2'-O-methoxy nucleoside
tggctcaggaaaccaaggcacag

SEQ ID NO: 312 - RNA, 23 nt, synthetic construct
  source 1..23: mol_type = other RNA
  modified_base 1: mod_base = OTHER; note = 2'-O-methoxy nucleoside with phosphorothioate bond
  modified_base 2: mod_base = OTHER; note = 2'-fluoro nucleoside with phosphorothioate bond
  modified_base 3: mod_base = OTHER; note = 2'-O-methoxy nucleoside
  modified_base 4: mod_base = OTHER; note = 2'-fluoro nucleoside
  modified_base 5: mod_base = OTHER; note = 2'-O-methoxy nucleoside
  modified_base 6: mod_base = OTHER; note = 2'-fluoro nucleoside
  modified_base 7: mod_base = OTHER; note = 2'-O-methoxy nucleoside
  modified_base 8: mod_base = OTHER; note = 2'-fluoro nucleoside
  modified_base 9: mod_base = OTHER; note = 2'-O-methoxy nucleoside
  modified_base 10: mod_base = OTHER; note = 2'-fluoro nucleoside
  modified_base 11: mod_base = OTHER; note = 2'-O-methoxy nucleoside
  modified_base 12: mod_base = OTHER; note = 2'-fluoro nucleoside
  modified_base 13: mod_base = OTHER; note = 2'-O-methoxy nucleoside
  modified_base 14: mod_base = OTHER; note = 2'-fluoro nucleoside
  modified_base 15: mod_base = OTHER; note = 2'-O-methoxy nucleoside
  modified_base 16: mod_base = OTHER; note = 2'-fluoro nucleoside
  modified_base 17: mod_base = OTHER; note = 2'-O-methoxy nucleoside
  modified_base 18: mod_base = OTHER; note = 2'-fluoro nucleoside
  modified_base 19: mod_base = OTHER; note = 2'-O-methoxy nucleoside
  modified_base 20: mod_base = OTHER; note = 2'-fluoro nucleoside
  modified_base 21: mod_base = OTHER; note = 2'-O-methoxy nucleoside with phosphorothioate bond
  modified_base 22: mod_base = OTHER; note = 2'-fluoro nucleoside with phosphorothioate bond
  modified_base 23: mod_base = OTHER; note = 2'-O-methoxy nucleoside
tagagcagagtaaaggtggctca

SEQ ID NO: 313 - RNA, 23 nt, synthetic construct
  source 1..23: mol_type = other RNA
  modified_base 1: mod_base = OTHER; note = 2'-O-methoxy nucleoside with phosphorothioate bond
  modified_base 2: mod_base = OTHER; note = 2'-fluoro nucleoside with phosphorothioate bond
  modified_base 3: mod_base = OTHER; note = 2'-O-methoxy nucleoside
  modified_base 4: mod_base = OTHER; note = 2'-fluoro nucleoside
  modified_base 5: mod_base = OTHER; note = 2'-O-methoxy nucleoside
  modified_base 6: mod_base = OTHER; note = 2'-fluoro nucleoside
  modified_base 7: mod_base = OTHER; note = 2'-O-methoxy nucleoside
  modified_base 8: mod_base = OTHER; note = 2'-fluoro nucleoside
  modified_base 9: mod_base = OTHER; note = 2'-O-methoxy nucleoside
  modified_base 10: mod_base = OTHER; note = 2'-fluoro nucleoside
  modified_base 11: mod_base = OTHER; note = 2'-O-methoxy nucleoside
  modified_base 12: mod_base = OTHER; note = 2'-fluoro nucleoside
  modified_base 13: mod_base = OTHER; note = 2'-O-methoxy nucleoside
  modified_base 14: mod_base = OTHER; note = 2'-fluoro nucleoside
  modified_base 15: mod_base = OTHER; note = 2'-O-methoxy nucleoside
  modified_base 16: mod_base = OTHER; note = 2'-fluoro nucleoside
  modified_base 17: mod_base = OTHER; note = 2'-O-methoxy nucleoside
  modified_base 18: mod_base = OTHER; note = 2'-fluoro nucleoside
  modified_base 19: mod_base = OTHER; note = 2'-O-methoxy nucleoside
  modified_base 20: mod_base = OTHER; note = 2'-fluoro nucleoside
  modified_base 21: mod_base = OTHER; note = 2'-O-methoxy nucleoside with phosphorothioate bond
  modified_base 22: mod_base = OTHER; note = 2'-fluoro nucleoside with phosphorothioate bond
  modified_base 23: mod_base = OTHER; note = 2'-O-methoxy nucleoside
catagagcagagtaaaggtggct

SEQ ID NO: 314 - RNA, 23 nt, synthetic construct
  source 1..23: mol_type = other RNA
  modified_base 1: mod_base = OTHER; note = 2'-O-methoxy nucleoside with phosphorothioate bond
  modified_base 2: mod_base = OTHER; note = 2'-fluoro nucleoside with phosphorothioate bond
  modified_base 3: mod_base = OTHER; note = 2'-O-methoxy nucleoside
  modified_base 4: mod_base = OTHER; note = 2'-fluoro nucleoside
  modified_base 5: mod_base = OTHER; note = 2'-O-methoxy nucleoside
  modified_base 6: mod_base = OTHER; note = 2'-fluoro nucleoside
  modified_base 7: mod_base = OTHER; note = 2'-O-methoxy nucleoside
  modified_base 8: mod_base = OTHER; note = 2'-fluoro nucleoside
  modified_base 9: mod_base = OTHER; note = 2'-O-methoxy nucleoside
  modified_base 10: mod_base = OTHER; note = 2'-fluoro nucleoside
  modified_base 11: mod_base = OTHER; note = 2'-O-methoxy nucleoside
  modified_base 12: mod_base = OTHER; note = 2'-fluoro nucleoside
  modified_base 13: mod_base = OTHER; note = 2'-O-methoxy nucleoside
  modified_base 14: mod_base = OTHER; note = 2'-fluoro nucleoside
  modified_base 15: mod_base = OTHER; note = 2'-O-methoxy nucleoside
  modified_base 16: mod_base = OTHER; note = 2'-fluoro nucleoside
  modified_base 17: mod_base = OTHER; note = 2'-O-methoxy nucleoside
  modified_base 18: mod_base = OTHER; note = 2'-fluoro nucleoside
  modified_base 19: mod_base = OTHER; note = 2'-O-methoxy nucleoside
  modified_base 20: mod_base = OTHER; note = 2'-fluoro nucleoside
  modified_base 21: mod_base = OTHER; note = 2'-O-methoxy nucleoside with phosphorothioate bond
  modified_base 22: mod_base = OTHER; note = 2'-fluoro nucleoside with phosphorothioate bond
  modified_base 23: mod_base = OTHER; note = 2'-O-methoxy nucleoside
ctggcatagagcagagtaaaggt

SEQ ID NO: 315 - RNA, 23 nt, synthetic construct
  source 1..23: mol_type = other RNA
  modified_base 1: mod_base = OTHER; note = 2'-O-methoxy nucleoside with phosphorothioate bond
  modified_base 2: mod_base = OTHER; note = 2'-fluoro nucleoside with phosphorothioate bond
  modified_base 3: mod_base = OTHER; note = 2'-O-methoxy nucleoside
  modified_base 4: mod_base = OTHER; note = 2'-fluoro nucleoside
  modified_base 5: mod_base = OTHER; note = 2'-O-methoxy nucleoside
  modified_base 6: mod_base = OTHER; note = 2'-fluoro nucleoside
  modified_base 7: mod_base = OTHER; note = 2'-O-methoxy nucleoside
  modified_base 8: mod_base = OTHER; note = 2'-fluoro nucleoside
  modified_base 9: mod_base = OTHER; note = 2'-O-methoxy nucleoside
  modified_base 10: mod_base = OTHER; note = 2'-fluoro nucleoside
  modified_base 11: mod_base = OTHER; note = 2'-O-methoxy nucleoside
  modified_base 12: mod_base = OTHER; note = 2'-fluoro nucleoside
  modified_base 13: mod_base = OTHER; note = 2'-O-methoxy nucleoside
  modified_base 14: mod_base = OTHER; note = 2'-fluoro nucleoside
  modified_base 15: mod_base = OTHER; note = 2'-O-methoxy nucleoside
  modified_base 16: mod_base = OTHER; note = 2'-fluoro nucleoside
  modified_base 17: mod_base = OTHER; note = 2'-O-methoxy nucleoside
  modified_base 18: mod_base = OTHER; note = 2'-fluoro nucleoside
  modified_base 19: mod_base = OTHER; note = 2'-O-methoxy nucleoside
  modified_base 20: mod_base = OTHER; note = 2'-fluoro nucleoside
  modified_base 21: mod_base = OTHER; note = 2'-O-methoxy nucleoside with phosphorothioate bond
  modified_base 22: mod_base = OTHER; note = 2'-fluoro nucleoside with phosphorothioate bond
  modified_base 23: mod_base = OTHER; note = 2'-O-methoxy nucleoside
tttgggtgttgctagcacagcct

SEQ ID NO: 316 - RNA, 23 nt, synthetic construct
  source 1..23: mol_type = other RNA
  modified_base 1: mod_base = OTHER; note = 2'-O-methoxy nucleoside with phosphorothioate bond
  modified_base 2: mod_base = OTHER; note = 2'-fluoro nucleoside with phosphorothioate bond
  modified_base 3: mod_base = OTHER; note = 2'-O-methoxy nucleoside
  modified_base 4: mod_base = OTHER; note = 2'-fluoro nucleoside
  modified_base 5: mod_base = OTHER; note = 2'-O-methoxy nucleoside
  modified_base 6: mod_base = OTHER; note = 2'-fluoro nucleoside
  modified_base 7: mod_base = OTHER; note = 2'-O-methoxy nucleoside
  modified_base 8: mod_base = OTHER; note = 2'-fluoro nucleoside
  modified_base 9: mod_base = OTHER; note = 2'-O-methoxy nucleoside
  modified_base 10: mod_base = OTHER; note = 2'-fluoro nucleoside
  modified_base 11: mod_base = OTHER; note = 2'-O-methoxy nucleoside
  modified_base 12: mod_base = OTHER; note = 2'-fluoro nucleoside
  modified_base 13: mod_base = OTHER; note = 2'-O-methoxy nucleoside
  modified_base 14: mod_base = OTHER; note = 2'-fluoro nucleoside
  modified_base 15: mod_base = OTHER; note = 2'-O-methoxy nucleoside
  modified_base 16: mod_base = OTHER; note = 2'-fluoro nucleoside
  modified_base 17: mod_base = OTHER; note = 2'-O-methoxy nucleoside
  modified_base 18: mod_base = OTHER; note = 2'-fluoro nucleoside
  modified_base 19: mod_base = OTHER; note = 2'-O-methoxy nucleoside
  modified_base 20: mod_base = OTHER; note = 2'-fluoro nucleoside
  modified_base 21: mod_base = OTHER; note = 2'-O-methoxy nucleoside with phosphorothioate bond
  modified_base 22: mod_base = OTHER; note = 2'-fluoro nucleoside with phosphorothioate bond
  modified_base 23: mod_base = OTHER; note = 2'-O-methoxy nucleoside
tgccgagtcagtcctaggtgatg

SEQ ID NO: 317 - RNA, 23 nt, synthetic construct
  source 1..23: mol_type = other RNA
  modified_base 1: mod_base = OTHER; note = 2'-O-methoxy nucleoside with phosphorothioate bond
  modified_base 2: mod_base = OTHER; note = 2'-fluoro nucleoside with phosphorothioate bond
  modified_base 3: mod_base = OTHER; note = 2'-O-methoxy nucleoside
  modified_base 4: mod_base = OTHER; note = 2'-fluoro nucleoside
  modified_base 5: mod_base = OTHER; note = 2'-O-methoxy nucleoside
  modified_base 6: mod_base = OTHER; note = 2'-fluoro nucleoside
  modified_base 7: mod_base = OTHER; note = 2'-O-methoxy nucleoside
  modified_base 8: mod_base = OTHER; note = 2'-fluoro nucleoside
  modified_base 9: mod_base = OTHER; note = 2'-O-methoxy nucleoside
  modified_base 10: mod_base = OTHER; note = 2'-fluoro nucleoside
  modified_base 11: mod_base = OTHER; note = 2'-O-methoxy nucleoside
  modified_base 12: mod_base = OTHER; note = 2'-fluoro nucleoside
  modified_base 13: mod_base = OTHER; note = 2'-O-methoxy nucleoside
  modified_base 14: mod_base = OTHER; note = 2'-fluoro nucleoside
  modified_base 15: mod_base = OTHER; note = 2'-O-methoxy nucleoside
  modified_base 16: mod_base = OTHER; note = 2'-fluoro nucleoside
  modified_base 17: mod_base = OTHER; note = 2'-O-methoxy nucleoside
  modified_base 18: mod_base = OTHER; note = 2'-fluoro nucleoside
  modified_base 19: mod_base = OTHER; note = 2'-O-methoxy nucleoside
  modified_base 20: mod_base = OTHER; note = 2'-fluoro nucleoside
  modified_base 21: mod_base = OTHER; note = 2'-O-methoxy nucleoside with phosphorothioate bond
  modified_base 22: mod_base = OTHER; note = 2'-fluoro nucleoside with phosphorothioate bond
  modified_base 23: mod_base = OTHER; note = 2'-O-methoxy nucleoside
actgcacactgccgagtcagtcc

SEQ ID NO: 318 - RNA, 23 nt, synthetic construct
  source 1..23: mol_type = other RNA
  modified_base 1: mod_base = OTHER; note = 2'-O-methoxy nucleoside with phosphorothioate bond
  modified_base 2: mod_base = OTHER; note = 2'-fluoro nucleoside with phosphorothioate bond
  modified_base 3: mod_base = OTHER; note = 2'-O-methoxy nucleoside
  modified_base 4: mod_base = OTHER; note = 2'-fluoro nucleoside
  modified_base 5: mod_base = OTHER; note = 2'-O-methoxy nucleoside
  modified_base 6: mod_base = OTHER; note = 2'-fluoro nucleoside
  modified_base 7: mod_base = OTHER; note = 2'-O-methoxy nucleoside
  modified_base 8: mod_base = OTHER; note = 2'-fluoro nucleoside
  modified_base 9: mod_base = OTHER; note = 2'-O-methoxy nucleoside
  modified_base 10: mod_base = OTHER; note = 2'-fluoro nucleoside
  modified_base 11: mod_base = OTHER; note = 2'-O-methoxy nucleoside
  modified_base 12: mod_base = OTHER; note = 2'-fluoro nucleoside
  modified_base 13: mod_base = OTHER; note = 2'-O-methoxy nucleoside
  modified_base 14: mod_base = OTHER; note = 2'-fluoro nucleoside
  modified_base 15: mod_base = OTHER; note = 2'-O-methoxy nucleoside
  modified_base 16: mod_base = OTHER; note = 2'-fluoro nucleoside
  modified_base 17: mod_base = OTHER; note = 2'-O-methoxy nucleoside
  modified_base 18: mod_base = OTHER; note = 2'-fluoro nucleoside
  modified_base 19: mod_base = OTHER; note = 2'-O-methoxy nucleoside
  modified_base 20: mod_base = OTHER; note = 2'-fluoro nucleoside
  modified_base 21: mod_base = OTHER; note = 2'-O-methoxy nucleoside with phosphorothioate bond
  modified_base 22: mod_base = OTHER; note = 2'-fluoro nucleoside with phosphorothioate bond
  modified_base 23: mod_base = OTHER; note = 2'-O-methoxy nucleoside
tgcaccactgcacactgccgagt

SEQ ID NO: 319 - RNA, 23 nt, synthetic construct
  source 1..23: mol_type = other RNA
  modified_base 1: mod_base = OTHER; note = 2'-O-methoxy nucleoside with phosphorothioate bond
  modified_base 2: mod_base = OTHER; note = 2'-fluoro nucleoside with phosphorothioate bond
  modified_base 3: mod_base = OTHER; note = 2'-O-methoxy nucleoside
  modified_base 4: mod_base = OTHER; note = 2'-fluoro nucleoside
  modified_base 5: mod_base = OTHER; note = 2'-O-methoxy nucleoside
  modified_base 6: mod_base = OTHER; note = 2'-fluoro nucleoside
  modified_base 7: mod_base = OTHER; note = 2'-O-methoxy nucleoside
  modified_base 8: mod_base = OTHER; note = 2'-fluoro nucleoside
  modified_base 9: mod_base = OTHER; note = 2'-O-methoxy nucleoside
  modified_base 10: mod_base = OTHER; note = 2'-fluoro nucleoside
  modified_base 11: mod_base = OTHER; note = 2'-O-methoxy nucleoside
  modified_base 12: mod_base = OTHER; note = 2'-fluoro nucleoside
  modified_base 13: mod_base = OTHER; note = 2'-O-methoxy nucleoside
  modified_base 14: mod_base = OTHER; note = 2'-fluoro nucleoside
  modified_base 15: mod_base = OTHER; note = 2'-O-methoxy nucleoside
  modified_base 16: mod_base = OTHER; note = 2'-fluoro nucleoside
  modified_base 17: mod_base = OTHER; note = 2'-O-methoxy nucleoside
  modified_base 18: mod_base = OTHER; note = 2'-fluoro nucleoside
  modified_base 19: mod_base = OTHER; note = 2'-O-methoxy nucleoside
  modified_base 20: mod_base = OTHER; note = 2'-fluoro nucleoside
  modified_base 21: mod_base = OTHER; note = 2'-O-methoxy nucleoside with phosphorothioate bond
  modified_base 22: mod_base = OTHER; note = 2'-fluoro nucleoside with phosphorothioate bond
  modified_base 23: mod_base = OTHER; note = 2'-O-methoxy nucleoside
catgcaccactgcacactgccga

SEQ ID NO: 320 - RNA, 23 nt, synthetic construct
  source 1..23: mol_type = other RNA
  modified_base 1: mod_base = OTHER; note = 2'-O-methoxy nucleoside with phosphorothioate bond
  modified_base 2: mod_base = OTHER; note = 2'-fluoro nucleoside with phosphorothioate bond
  modified_base 3: mod_base = OTHER; note = 2'-O-methoxy nucleoside
  modified_base 4: mod_base = OTHER; note = 2'-fluoro nucleoside
  modified_base 5: mod_base = OTHER; note = 2'-O-methoxy nucleoside
  modified_base 6: mod_base = OTHER; note = 2'-fluoro nucleoside
  modified_base 7: mod_base = OTHER; note = 2'-O-methoxy nucleoside
  modified_base 8: mod_base = OTHER; note = 2'-fluoro nucleoside
  modified_base 9: mod_base = OTHER; note = 2'-O-methoxy nucleoside
  modified_base 10: mod_base = OTHER; note = 2'-fluoro nucleoside
  modified_base 11: mod_base = OTHER; note = 2'-O-methoxy nucleoside
  modified_base 12: mod_base = OTHER; note = 2'-fluoro nucleoside
  modified_base 13: mod_base = OTHER; note = 2'-O-methoxy nucleoside
  modified_base 14: mod_base = OTHER; note = 2'-fluoro nucleoside
  modified_base 15: mod_base = OTHER; note = 2'-O-methoxy nucleoside
  modified_base 16: mod_base = OTHER; note = 2'-fluoro nucleoside
  modified_base 17: mod_base = OTHER; note = 2'-O-methoxy nucleoside
  modified_base 18: mod_base = OTHER; note = 2'-fluoro nucleoside
  modified_base 19: mod_base = OTHER; note = 2'-O-methoxy nucleoside
  modified_base 20: mod_base = OTHER; note = 2'-fluoro nucleoside
  modified_base 21: mod_base = OTHER; note = 2'-O-methoxy nucleoside with phosphorothioate bond
  modified_base 22: mod_base = OTHER; note = 2'-fluoro nucleoside with phosphorothioate bond
  modified_base 23: mod_base = OTHER; note = 2'-O-methoxy nucleoside
agacagtgcatgcaccactgcac

SEQ ID NO: 321 - RNA, 23 nt, synthetic construct
  source 1..23: mol_type = other RNA
  modified_base 1: mod_base = OTHER; note = 2'-O-methoxy nucleoside with phosphorothioate bond
  modified_base 2: mod_base = OTHER; note = 2'-fluoro nucleoside with phosphorothioate bond
  modified_base 3: mod_base = OTHER; note = 2'-O-methoxy nucleoside
  modified_base 4: mod_base = OTHER; note = 2'-fluoro nucleoside
  modified_base 5: mod_base = OTHER; note = 2'-O-methoxy nucleoside
  modified_base 6: mod_base = OTHER; note = 2'-fluoro nucleoside
  modified_base 7: mod_base = OTHER; note = 2'-O-methoxy nucleoside
  modified_base 8: mod_base = OTHER; note = 2'-fluoro nucleoside
  modified_base 9: mod_base = OTHER; note = 2'-O-methoxy nucleoside
  modified_base 10: mod_base = OTHER; note = 2'-fluoro nucleoside
  modified_base 11: mod_base = OTHER; note = 2'-O-methoxy nucleoside
  modified_base 12: mod_base = OTHER; note = 2'-fluoro nucleoside
  modified_base 13: mod_base = OTHER; note = 2'-O-methoxy nucleoside
  modified_base 14: mod_base = OTHER; note = 2'-fluoro nucleoside
  modified_base 15: mod_base = OTHER; note = 2'-O-methoxy nucleoside
  modified_base 16: mod_base = OTHER; note = 2'-fluoro nucleoside
  modified_base 17: mod_base = OTHER; note = 2'-O-methoxy nucleoside
  modified_base 18: mod_base = OTHER; note = 2'-fluoro nucleoside
  modified_base 19: mod_base = OTHER; note = 2'-O-methoxy nucleoside
  modified_base 20: mod_base = OTHER; note = 2'-fluoro nucleoside
  modified_base 21: mod_base = OTHER; note = 2'-O-methoxy nucleoside with phosphorothioate bond
  modified_base 22: mod_base = OTHER; note = 2'-fluoro nucleoside with phosphorothioate bond
  modified_base 23: mod_base = OTHER; note = 2'-O-methoxy nucleoside
tggctgagacagtgcatgcacca

SEQ ID NO: 322 - RNA, 23 nt, synthetic construct
  source 1..23: mol_type = other RNA
  modified_base 1: mod_base = OTHER; note = 2'-O-methoxy nucleoside with phosphorothioate bond
  modified_base 2: mod_base = OTHER; note = 2'-fluoro nucleoside with phosphorothioate bond
  modified_base 3: mod_base = OTHER; note = 2'-O-methoxy nucleoside
  modified_base 4: mod_base = OTHER; note = 2'-fluoro nucleoside
  modified_base 5: mod_base = OTHER; note = 2'-O-methoxy nucleoside
  modified_base 6: mod_base = OTHER; note = 2'-fluoro nucleoside
  modified_base 7: mod_base = OTHER; note = 2'-O-methoxy nucleoside
  modified_base 8: mod_base = OTHER; note = 2'-fluoro nucleoside
  modified_base 9: mod_base = OTHER; note = 2'-O-methoxy nucleoside
  modified_base 10: mod_base = OTHER; note = 2'-fluoro nucleoside
  modified_base 11: mod_base = OTHER; note = 2'-O-methoxy nucleoside
  modified_base 12: mod_base = OTHER; note = 2'-fluoro nucleoside
  modified_base 13: mod_base = OTHER; note = 2'-O-methoxy nucleoside
  modified_base 14: mod_base = OTHER; note = 2'-fluoro nucleoside
  modified_base 15: mod_base = OTHER; note = 2'-O-methoxy nucleoside
  modified_base 16: mod_base = OTHER; note = 2'-fluoro nucleoside
  modified_base 17: mod_base = OTHER; note = 2'-O-methoxy nucleoside
  modified_base 18: mod_base = OTHER; note = 2'-fluoro nucleoside
  modified_base 19: mod_base = OTHER; note = 2'-O-methoxy nucleoside
  modified_base 20: mod_base = OTHER; note = 2'-fluoro nucleoside
  modified_base 21: mod_base = OTHER; note = 2'-O-methoxy nucleoside with phosphorothioate bond
  modified_base 22: mod_base = OTHER; note = 2'-fluoro nucleoside with phosphorothioate bond
  modified_base 23: mod_base = OTHER; note = 2'-O-methoxy nucleoside
tgccgggtagtggagcgggttgg

SEQ ID NO: 323 - RNA, 23 nt, synthetic construct
  source 1..23: mol_type = other RNA
  modified_base 1: mod_base = OTHER; note = 2'-O-methoxy nucleoside with phosphorothioate bond
  modified_base 2: mod_base = OTHER; note = 2'-fluoro nucleoside with phosphorothioate bond
  modified_base 3: mod_base = OTHER; note = 2'-O-methoxy nucleoside
  modified_base 4: mod_base = OTHER; note = 2'-fluoro nucleoside
  modified_base 5: mod_base = OTHER; note = 2'-O-methoxy nucleoside
  modified_base 6: mod_base = OTHER; note = 2'-fluoro nucleoside
  modified_base 7: mod_base = OTHER; note = 2'-O-methoxy nucleoside
  modified_base 8: mod_base = OTHER; note = 2'-fluoro nucleoside
  modified_base 9: mod_base = OTHER; note = 2'-O-methoxy nucleoside
  modified_base 10: mod_base = OTHER; note = 2'-fluoro nucleoside
  modified_base 11: mod_base = OTHER; note = 2'-O-methoxy nucleoside
  modified_base 12: mod_base = OTHER; note = 2'-fluoro nucleoside
  modified_base 13: mod_base = OTHER; note = 2'-O-methoxy nucleoside
  modified_base 14: mod_base = OTHER; note = 2'-fluoro nucleoside
  modified_base 15: mod_base = OTHER; note = 2'-O-methoxy nucleoside
  modified_base 16: mod_base = OTHER; note = 2'-fluoro nucleoside
  modified_base 17: mod_base = OTHER; note = 2'-O-methoxy nucleoside
  modified_base 18: mod_base = OTHER; note = 2'-fluoro nucleoside
  modified_base 19: mod_base = OTHER; note = 2'-O-methoxy nucleoside
  modified_base 20: mod_base = OTHER; note = 2'-fluoro nucleoside
  modified_base 21: mod_base = OTHER; note = 2'-O-methoxy nucleoside with phosphorothioate bond
  modified_base 22: mod_base = OTHER; note = 2'-fluoro nucleoside with phosphorothioate bond
  modified_base 23: mod_base = OTHER; note = 2'-O-methoxy nucleoside
atgtgtaccctgccgggtagtgg

SEQ ID NO: 324 - RNA, 23 nt, synthetic construct
  source 1..23: mol_type = other RNA
  modified_base 1: mod_base = OTHER; note = 2'-O-methoxy nucleoside with phosphorothioate bond
  modified_base 2: mod_base = OTHER; note = 2'-fluoro nucleoside with phosphorothioate bond
  modified_base 3: mod_base = OTHER; note = 2'-O-methoxy nucleoside
  modified_base 4: mod_base = OTHER; note = 2'-fluoro nucleoside
  modified_base 5: mod_base = OTHER; note = 2'-O-methoxy nucleoside
  modified_base 6: mod_base = OTHER; note = 2'-fluoro nucleoside
  modified_base 7: mod_base = OTHER; note = 2'-O-methoxy nucleoside
  modified_base 8: mod_base = OTHER; note = 2'-fluoro nucleoside
  modified_base 9: mod_base = OTHER; note = 2'-O-methoxy nucleoside
  modified_base 10: mod_base = OTHER; note = 2'-fluoro nucleoside
  modified_base 11: mod_base = OTHER; note = 2'-O-methoxy nucleoside
  modified_base 12: mod_base = OTHER; note = 2'-fluoro nucleoside
  modified_base 13: mod_base = OTHER; note = 2'-O-methoxy nucleoside
  modified_base 14: mod_base = OTHER; note = 2'-fluoro nucleoside
  modified_base 15: mod_base = OTHER; note = 2'-O-methoxy nucleoside
  modified_base 16: mod_base = OTHER; note = 2'-fluoro nucleoside
  modified_base 17: mod_base = OTHER; note = 2'-O-methoxy nucleoside
  modified_base 18: mod_base = OTHER; note = 2'-fluoro nucleoside
  modified_base 19: mod_base = OTHER; note = 2'-O-methoxy nucleoside
  modified_base 20: mod_base = OTHER; note = 2'-fluoro nucleoside
  modified_base 21: mod_base = OTHER; note = 2'-O-methoxy nucleoside with phosphorothioate bond
  modified_base 22: mod_base = OTHER; note = 2'-fluoro nucleoside with phosphorothioate bond
  modified_base 23: mod_base = OTHER; note = 2'-O-methoxy nucleoside
tttcttcctctgtgaagtagggg

SEQ ID NO: 325 - RNA, 23 nt, synthetic construct
  source 1..23: mol_type = other RNA
  modified_base 1: mod_base = OTHER; note = 2'-O-methoxy nucleoside with phosphorothioate bond
  modified_base 2: mod_base = OTHER; note = 2'-fluoro nucleoside with phosphorothioate bond
  modified_base 3: mod_base = OTHER; note = 2'-O-methoxy nucleoside
  modified_base 4: mod_base = OTHER; note = 2'-fluoro nucleoside
  modified_base 5: mod_base = OTHER; note = 2'-O-methoxy nucleoside
  modified_base 6: mod_base = OTHER; note = 2'-fluoro nucleoside
  modified_base 7: mod_base = OTHER; note = 2'-O-methoxy nucleoside
  modified_base 8: mod_base = OTHER; note = 2'-fluoro nucleoside
  modified_base 9: mod_base = OTHER; note = 2'-O-methoxy nucleoside
  modified_base 10: mod_base = OTHER; note = 2'-fluoro nucleoside
  modified_base 11: mod_base = OTHER; note = 2'-O-methoxy nucleoside
  modified_base 12: mod_base = OTHER; note = 2'-fluoro nucleoside
  modified_base 13: mod_base = OTHER; note = 2'-O-methoxy nucleoside
  modified_base 14: mod_base = OTHER; note = 2'-fluoro nucleoside
  modified_base 15: mod_base = OTHER; note = 2'-O-methoxy nucleoside
  modified_base 16: mod_base = OTHER; note = 2'-fluoro nucleoside
  modified_base 17: mod_base = OTHER; note = 2'-O-methoxy nucleoside
  modified_base 18: mod_base = OTHER; note = 2'-fluoro nucleoside
  modified_base 19: mod_base = OTHER; note = 2'-O-methoxy nucleoside
  modified_base 20: mod_base = OTHER; note = 2'-fluoro nucleoside
  modified_base 21: mod_base = OTHER; note = 2'-O-methoxy nucleoside with phosphorothioate bond
  modified_base 22: mod_base = OTHER; note = 2'-fluoro nucleoside with phosphorothioate bond
  modified_base 23: mod_base = OTHER; note = 2'-O-methoxy nucleoside
atcactcaccgagcttcctggtc

SEQ ID NO: 326 - RNA, 23 nt, synthetic construct
  source 1..23: mol_type = other RNA
  modified_base 1: mod_base = OTHER; note = 2'-O-methoxy nucleoside with phosphorothioate bond
  modified_base 2: mod_base = OTHER; note = 2'-fluoro nucleoside with phosphorothioate bond
  modified_base 3: mod_base = OTHER; note = 2'-O-methoxy nucleoside
  modified_base 4: mod_base = OTHER; note = 2'-fluoro nucleoside
  modified_base 5: mod_base = OTHER; note = 2'-O-methoxy nucleoside
  modified_base 6: mod_base = OTHER; note = 2'-fluoro nucleoside
  modified_base 7: mod_base = OTHER; note = 2'-O-methoxy nucleoside
  modified_base 8: mod_base = OTHER; note = 2'-fluoro nucleoside
  modified_base 9: mod_base = OTHER; note = 2'-O-methoxy nucleoside
  modified_base 10: mod_base = OTHER; note = 2'-fluoro nucleoside
  modified_base 11: mod_base = OTHER; note = 2'-O-methoxy nucleoside
  modified_base 12: mod_base = OTHER; note = 2'-fluoro nucleoside
  modified_base 13: mod_base = OTHER; note = 2'-O-methoxy nucleoside
  modified_base 14: mod_base = OTHER; note = 2'-fluoro nucleoside
  modified_base 15: mod_base = OTHER; note = 2'-O-methoxy nucleoside
  modified_base 16: mod_base = OTHER; note = 2'-fluoro nucleoside
  modified_base 17: mod_base = OTHER; note = 2'-O-methoxy nucleoside
  modified_base 18: mod_base = OTHER; note = 2'-fluoro nucleoside
  modified_base 19: mod_base = OTHER; note = 2'-O-methoxy nucleoside
  modified_base 20: mod_base = OTHER; note = 2'-fluoro nucleoside
  modified_base 21: mod_base = OTHER; note = 2'-O-methoxy nucleoside with phosphorothioate bond
  modified_base 22: mod_base = OTHER; note = 2'-fluoro nucleoside with phosphorothioate bond
  modified_base 23: mod_base = OTHER; note = 2'-O-methoxy nucleoside
catgcctgcaggcatcgttctgc

SEQ ID NO: 327 - RNA, 23 nt, synthetic construct
  source 1..23: mol_type = other RNA
  modified_base 1: mod_base = OTHER; note = 2'-O-methoxy nucleoside with phosphorothioate bond
  modified_base 2: mod_base = OTHER; note = 2'-fluoro nucleoside with phosphorothioate bond
  modified_base 3: mod_base = OTHER; note = 2'-O-methoxy nucleoside
  modified_base 4: mod_base = OTHER; note = 2'-fluoro nucleoside
  modified_base 5: mod_base = OTHER; note = 2'-O-methoxy nucleoside
  modified_base 6: mod_base = OTHER; note = 2'-fluoro nucleoside
  modified_base 7: mod_base = OTHER; note = 2'-O-methoxy nucleoside
  modified_base 8: mod_base = OTHER; note = 2'-fluoro nucleoside
  modified_base 9: mod_base = OTHER; note = 2'-O-methoxy nucleoside
  modified_base 10: mod_base = OTHER; note = 2'-fluoro nucleoside
  modified_base 11: mod_base = OTHER; note = 2'-O-methoxy nucleoside
  modified_base 12: mod_base = OTHER; note = 2'-fluoro nucleoside
  modified_base 13: mod_base = OTHER; note = 2'-O-methoxy nucleoside
  modified_base 14: mod_base = OTHER; note = 2'-fluoro nucleoside
  modified_base 15: mod_base = OTHER; note = 2'-O-methoxy nucleoside
  modified_base 16: mod_base = OTHER; note = 2'-fluoro nucleoside
  modified_base 17: mod_base = OTHER; note = 2'-O-methoxy nucleoside
  modified_base 18: mod_base = OTHER; note = 2'-fluoro nucleoside
  modified_base 19: mod_base = OTHER; note = 2'-O-methoxy nucleoside
  modified_base 20: mod_base = OTHER; note = 2'-fluoro nucleoside
  modified_base 21: mod_base = OTHER; note = 2'-O-methoxy nucleoside with phosphorothioate bond
  modified_base 22: mod_base = OTHER; note = 2'-fluoro nucleoside with phosphorothioate bond
  modified_base 23: mod_base = OTHER; note = 2'-O-methoxy nucleoside
aaagttccatgcctgcaggcatc

SEQ ID NO: 328 - RNA, 23 nt, synthetic construct
  source 1..23: mol_type = other RNA
  modified_base 1: mod_base = OTHER; note = 2'-O-methoxy nucleoside with phosphorothioate bond
  modified_base 2: mod_base = OTHER; note = 2'-fluoro nucleoside with phosphorothioate bond
  modified_base 3: mod_base = OTHER; note = 2'-O-methoxy nucleoside
  modified_base 4: mod_base = OTHER; note = 2'-fluoro nucleoside
  modified_base 5: mod_base = OTHER; note = 2'-O-methoxy nucleoside
  modified_base 6: mod_base = OTHER; note = 2'-fluoro nucleoside
  modified_base 7: mod_base = OTHER; note = 2'-O-methoxy nucleoside
  modified_base 8: mod_base = OTHER; note = 2'-fluoro nucleoside
  modified_base 9: mod_base = OTHER; note = 2'-O-methoxy nucleoside
  modified_base 10: mod_base = OTHER; note = 2'-fluoro nucleoside
  modified_base 11: mod_base = OTHER; note = 2'-O-methoxy nucleoside
  modified_base 12: mod_base = OTHER; note = 2'-fluoro nucleoside
  modified_base 13: mod_base = OTHER; note = 2'-O-methoxy nucleoside
  modified_base 14: mod_base = OTHER; note = 2'-fluoro nucleoside
  modified_base 15: mod_base = OTHER; note = 2'-O-methoxy nucleoside
  modified_base 16: mod_base = OTHER; note = 2'-fluoro nucleoside
  modified_base 17: mod_base = OTHER; note = 2'-O-methoxy nucleoside
  modified_base 18: mod_base = OTHER; note = 2'-fluoro nucleoside
  modified_base 19: mod_base = OTHER; note = 2'-O-methoxy nucleoside
  modified_base 20: mod_base = OTHER; note = 2'-fluoro nucleoside
  modified_base 21: mod_base = OTHER; note = 2'-O-methoxy nucleoside with phosphorothioate bond
  modified_base 22: mod_base = OTHER; note = 2'-fluoro nucleoside with phosphorothioate bond
  modified_base 23: mod_base = OTHER; note = 2'-O-methoxy nucleoside
aatcaggcctgggtgataacgga

SEQ ID NO: 329 - RNA, 23 nt, synthetic construct
  source 1..23: mol_type = other RNA
  modified_base 1: mod_base = OTHER; note = 2'-O-methoxy nucleoside with phosphorothioate bond
  modified_base 2: mod_base = OTHER; note = 2'-fluoro nucleoside with phosphorothioate bond
  modified_base 3: mod_base = OTHER; note = 2'-O-methoxy nucleoside
  modified_base 4: mod_base = OTHER; note = 2'-fluoro nucleoside
  modified_base 5: mod_base = OTHER; note = 2'-O-methoxy nucleoside
  modified_base 6: mod_base = OTHER; note = 2'-fluoro nucleoside
  modified_base 7: mod_base = OTHER; note = 2'-O-methoxy nucleoside
  modified_base 8: mod_base = OTHER; note = 2'-fluoro nucleoside
  modified_base 9: mod_base = OTHER; note = 2'-O-methoxy nucleoside
  modified_base 10: mod_base = OTHER; note = 2'-fluoro nucleoside
  modified_base 11: mod_base = OTHER; note = 2'-O-methoxy nucleoside
  modified_base 12: mod_base = OTHER; note = 2'-fluoro nucleoside
  modified_base 13: mod_base = OTHER; note = 2'-O-methoxy nucleoside
  modified_base 14: mod_base = OTHER; note = 2'-fluoro nucleoside
  modified_base 15: mod_base = OTHER; note = 2'-O-methoxy nucleoside
  modified_base 16: mod_base = OTHER; note = 2'-fluoro nucleoside
  modified_base 17: mod_base = OTHER; note = 2'-O-methoxy nucleoside
  modified_base 18: mod_base = OTHER; note = 2'-fluoro nucleoside
  modified_base 19: mod_base = OTHER; note = 2'-O-methoxy nucleoside
  modified_base 20: mod_base = OTHER; note = 2'-fluoro nucleoside
  modified_base 21: mod_base = OTHER; note = 2'-O-methoxy nucleoside with phosphorothioate bond
  modified_base 22: mod_base = OTHER; note = 2'-fluoro nucleoside with phosphorothioate bond
  modified_base 23: mod_base = OTHER; note = 2'-O-methoxy nucleoside
ccagtgaatcaggcctgggtgat

SEQ ID NO: 330 - RNA, 23 nt, synthetic construct
  source 1..23: mol_type = other RNA
  modified_base 1: mod_base = OTHER; note = 2'-O-methoxy nucleoside with phosphorothioate bond
  modified_base 2: mod_base = OTHER; note = 2'-fluoro nucleoside with phosphorothioate bond
  modified_base 3: mod_base = OTHER; note = 2'-O-methoxy nucleoside
  modified_base 4: mod_base = OTHER; note = 2'-fluoro nucleoside
  modified_base 5: mod_base = OTHER; note = 2'-O-methoxy nucleoside
  modified_base 6: mod_base = OTHER; note = 2'-fluoro nucleoside
  modified_base 7: mod_base = OTHER; note = 2'-O-methoxy nucleoside
  modified_base 8: mod_base = OTHER; note = 2'-fluoro nucleoside
  modified_base 9: mod_base = OTHER; note = 2'-O-methoxy nucleoside
  modified_base 10: mod_base = OTHER; note = 2'-fluoro nucleoside
  modified_base 11: mod_base = OTHER; note = 2'-O-methoxy nucleoside
  modified_base 12: mod_base = OTHER; note = 2'-fluoro nucleoside
  modified_base 13: mod_base = OTHER; note = 2'-O-methoxy nucleoside
  modified_base 14: mod_base = OTHER; note = 2'-fluoro nucleoside
  modified_base 15: mod_base = OTHER; note = 2'-O-methoxy nucleoside
  modified_base 16: mod_base = OTHER; note = 2'-fluoro nucleoside
  modified_base 17: mod_base = OTHER; note = 2'-O-methoxy nucleoside
  modified_base 18: mod_base = OTHER; note = 2'-fluoro nucleoside
  modified_base 19: mod_base = OTHER; note = 2'-O-methoxy nucleoside
  modified_base 20: mod_base = OTHER; note = 2'-fluoro nucleoside
  modified_base 21: mod_base = OTHER; note = 2'-O-methoxy nucleoside with phosphorothioate bond
  modified_base 22: mod_base = OTHER; note = 2'-fluoro nucleoside with phosphorothioate bond
  modified_base 23: mod_base = OTHER; note = 2'-O-methoxy nucleoside
catgccttagaagcatctccgcc

SEQ ID NO: 331 - RNA, 23 nt, synthetic construct
  source 1..23: mol_type = other RNA
  modified_base 1: mod_base = OTHER; note = 2'-O-methoxy nucleoside with phosphorothioate bond
  modified_base 2: mod_base = OTHER; note = 2'-fluoro nucleoside with phosphorothioate bond
  modified_base 3: mod_base = OTHER; note = 2'-O-methoxy nucleoside
  modified_base 4: mod_base = OTHER; note = 2'-fluoro nucleoside
  modified_base 5: mod_base = OTHER; note = 2'-O-methoxy nucleoside
  modified_base 6: mod_base = OTHER; note = 2'-fluoro nucleoside
  modified_base 7: mod_base = OTHER; note = 2'-O-methoxy nucleoside
  modified_base 8: mod_base = OTHER; note = 2'-fluoro nucleoside
  modified_base 9: mod_base = OTHER; note = 2'-O-methoxy nucleoside
  modified_base 10: mod_base = OTHER; note = 2'-fluoro nucleoside
  modified_base 11: mod_base = OTHER; note = 2'-O-methoxy nucleoside
  modified_base 12: mod_base = OTHER; note = 2'-fluoro nucleoside
  modified_base 13: mod_base = OTHER; note = 2'-O-methoxy nucleoside
  modified_base 14: mod_base = OTHER; note = 2'-fluoro nucleoside
  modified_base 15: mod_base = OTHER; note = 2'-O-methoxy nucleoside
  modified_base 16: mod_base = OTHER; note = 2'-fluoro nucleoside
  modified_base 17: mod_base = OTHER; note = 2'-O-methoxy nucleoside
  modified_base 18: mod_base = OTHER; note = 2'-fluoro nucleoside
  modified_base 19: mod_base = OTHER; note = 2'-O-methoxy nucleoside
  modified_base 20: mod_base = OTHER; note = 2'-fluoro nucleoside
  modified_base 21: mod_base = OTHER; note = 2'-O-methoxy nucleoside with phosphorothioate bond
  modified_base 22: mod_base = OTHER; note = 2'-fluoro nucleoside with phosphorothioate bond
  modified_base 23: mod_base = OTHER; note = 2'-O-methoxy nucleoside
gaccatgccttagaagcatctcc

SEQ ID NO: 332 - RNA, 23 nt, synthetic construct
  source 1..23: mol_type = other RNA
  modified_base 1: mod_base = OTHER; note = 2'-O-methoxy nucleoside with phosphorothioate bond
  modified_base 2: mod_base = OTHER; note = 2'-fluoro nucleoside with phosphorothioate bond
  modified_base 3: mod_base = OTHER; note = 2'-O-methoxy nucleoside
  modified_base 4: mod_base = OTHER; note = 2'-fluoro nucleoside
  modified_base 5: mod_base = OTHER; note = 2'-O-methoxy nucleoside
  modified_base 6: mod_base = OTHER; note = 2'-fluoro nucleoside
  modified_base 7: mod_base = OTHER; note = 2'-O-methoxy nucleoside
  modified_base 8: mod_base = OTHER; note = 2'-fluoro nucleoside
  modified_base 9: mod_base = OTHER; note = 2'-O-methoxy nucleoside
  modified_base 10: mod_base = OTHER; note = 2'-fluoro nucleoside
  modified_base 11: mod_base = OTHER; note = 2'-O-methoxy nucleoside
  modified_base 12: mod_base = OTHER; note = 2'-fluoro nucleoside
  modified_base 13: mod_base = OTHER; note = 2'-O-methoxy nucleoside
  modified_base 14: mod_base = OTHER; note = 2'-fluoro nucleoside
  modified_base 15: mod_base = OTHER; note = 2'-O-methoxy nucleoside
  modified_base 16: mod_base = OTHER; note = 2'-fluoro nucleoside
  modified_base 17: mod_base = OTHER; note = 2'-O-methoxy nucleoside
  modified_base 18: mod_base = OTHER; note = 2'-fluoro nucleoside
  modified_base 19: mod_base = OTHER; note = 2'-O-methoxy nucleoside
  modified_base 20: mod_base = OTHER; note = 2'-fluoro nucleoside
  modified_base 21: mod_base = OTHER; note = 2'-O-methoxy nucleoside with phosphorothioate bond
  modified_base 22: mod_base = OTHER; note = 2'-fluoro nucleoside with phosphorothioate bond
  modified_base 23: mod_base = OTHER; note = 2'-O-methoxy nucleoside
tgctcaaggagggacagttgttg

SEQ ID NO: 333 - RNA, 23 nt, synthetic construct
  source 1..23: mol_type = other RNA
  modified_base 1: mod_base = OTHER; note = 2'-O-methoxy nucleoside with phosphorothioate bond
  modified_base 2: mod_base = OTHER; note = 2'-fluoro nucleoside with phosphorothioate bond
  modified_base 3: mod_base = OTHER; note = 2'-O-methoxy nucleoside
  modified_base 4: mod_base = OTHER; note = 2'-fluoro nucleoside
  modified_base 5: mod_base = OTHER; note = 2'-O-methoxy nucleoside
  modified_base 6: mod_base = OTHER; note = 2'-fluoro nucleoside
  modified_base 7: mod_base = OTHER; note = 2'-O-methoxy nucleoside
  modified_base 8: mod_base = OTHER; note = 2'-fluoro nucleoside
  modified_base 9: mod_base = OTHER; note = 2'-O-methoxy nucleoside
  modified_base 10: mod_base = OTHER; note = 2'-fluoro nucleoside
  modified_base 11: mod_base = OTHER; note = 2'-O-methoxy nucleoside
  modified_base 12: mod_base = OTHER; note = 2'-fluoro nucleoside
  modified_base 13: mod_base = OTHER; note = 2'-O-methoxy nucleoside
  modified_base 14: mod_base = OTHER; note = 2'-fluoro nucleoside
  modified_base 15: mod_base = OTHER; note = 2'-O-methoxy nucleoside
  modified_base 16: mod_base = OTHER; note = 2'-fluoro nucleoside
  modified_base 17: mod_base = OTHER; note = 2'-O-methoxy nucleoside
  modified_base 18: mod_base = OTHER; note = 2'-fluoro nucleoside
  modified_base 19: mod_base = OTHER; note = 2'-O-methoxy nucleoside
  modified_base 20: mod_base = OTHER; note = 2'-fluoro nucleoside
  modified_base 21: mod_base = OTHER; note = 2'-O-methoxy nucleoside with phosphorothioate bond
  modified_base 22: mod_base = OTHER; note = 2'-fluoro nucleoside with phosphorothioate bond
  modified_base 23: mod_base = OTHER; note = 2'-O-methoxy nucleoside
aaatgtctgcttgcttgggtggg

SEQ ID NO: 334 - RNA, 23 nt, synthetic construct
  source 1..23: mol_type = other RNA
  modified_base 1: mod_base = OTHER; note = 2'-O-methoxy nucleoside with phosphorothioate bond
  modified_base 2: mod_base = OTHER; note = 2'-fluoro nucleoside with phosphorothioate bond
  modified_base 3: mod_base = OTHER; note = 2'-O-methoxy nucleoside
  modified_base 4: mod_base = OTHER; note = 2'-fluoro nucleoside
  modified_base 5: mod_base = OTHER; note = 2'-O-methoxy nucleoside
  modified_base 6: mod_base = OTHER; note = 2'-fluoro nucleoside
  modified_base 7: mod_base = OTHER; note = 2'-O-methoxy nucleoside
  modified_base 8: mod_base = OTHER; note = 2'-fluoro nucleoside
  modified_base 9: mod_base = OTHER; note = 2'-O-methoxy nucleoside
  modified_base 10: mod_base = OTHER; note = 2'-fluoro nucleoside
  modified_base 11: mod_base = OTHER; note = 2'-O-methoxy nucleoside
  modified_base 12: mod_base = OTHER; note = 2'-fluoro nucleoside
  modified_base 13: mod_base = OTHER; note = 2'-O-methoxy nucleoside
  modified_base 14: mod_base = OTHER; note = 2'-fluoro nucleoside
  modified_base 15: mod_base = OTHER; note = 2'-O-methoxy nucleoside
  modified_base 16: mod_base = OTHER; note = 2'-fluoro nucleoside
  modified_base 17: mod_base = OTHER; note = 2'-O-methoxy nucleoside
  modified_base 18: mod_base = OTHER; note = 2'-fluoro nucleoside
  modified_base 19: mod_base = OTHER; note = 2'-O-methoxy nucleoside
  modified_base 20: mod_base = OTHER; note = 2'-fluoro nucleoside
  modified_base 21: mod_base = OTHER; note = 2'-O-methoxy nucleoside with phosphorothioate bond
  modified_base 22: mod_base = OTHER; note = 2'-fluoro nucleoside with phosphorothioate bond
  modified_base 23: mod_base = OTHER; note = 2'-O-methoxy nucleoside
agataaatgtctgcttgcttggg

SEQ ID NO: 335 - RNA, 23 nt, synthetic construct
  source 1..23: mol_type = other RNA
  modified_base 1: mod_base = OTHER; note = 2'-O-methoxy nucleoside with phosphorothioate bond
  modified_base 2: mod_base = OTHER; note = 2'-fluoro nucleoside with phosphorothioate bond
  modified_base 3: mod_base = OTHER; note = 2'-O-methoxy nucleoside
  modified_base 4: mod_base = OTHER; note = 2'-fluoro nucleoside
  modified_base 5: mod_base = OTHER; note = 2'-O-methoxy nucleoside
  modified_base 6: mod_base = OTHER; note = 2'-fluoro nucleoside
  modified_base 7: mod_base = OTHER; note = 2'-O-methoxy nucleoside
  modified_base 8: mod_base = OTHER; note = 2'-fluoro nucleoside
  modified_base 9: mod_base = OTHER; note = 2'-O-methoxy nucleoside
  modified_base 10: mod_base = OTHER; note = 2'-fluoro nucleoside
  modified_base 11: mod_base = OTHER; note = 2'-O-methoxy nucleoside
  modified_base 12: mod_base = OTHER; note = 2'-fluoro nucleoside
  modified_base 13: mod_base = OTHER; note = 2'-O-methoxy nucleoside
  modified_base 14: mod_base = OTHER; note = 2'-fluoro nucleoside
  modified_base 15: mod_base = OTHER; note = 2'-O-methoxy nucleoside
  modified_base 16: mod_base = OTHER; note = 2'-fluoro nucleoside
  modified_base 17: mod_base = OTHER; note = 2'-O-methoxy nucleoside
  modified_base 18: mod_base = OTHER; note = 2'-fluoro nucleoside
  modified_base 19: mod_base = OTHER; note = 2'-O-methoxy nucleoside
  modified_base 20: mod_base = OTHER; note = 2'-fluoro nucleoside
  modified_base 21: mod_base = OTHER; note = 2'-O-methoxy nucleoside with phosphorothioate bond
  modified_base 22: mod_base = OTHER; note = 2'-fluoro nucleoside with phosphorothioate bond
  modified_base 23: mod_base = OTHER; note = 2'-O-methoxy nucleoside
aacagagaggacagacccaaaag

SEQ ID NO: 336 - RNA, 23 nt, synthetic construct
  source 1..23: mol_type = other RNA
  modified_base 1: mod_base = OTHER; note = 2'-O-methoxy nucleoside with phosphorothioate bond
  modified_base 2: mod_base = OTHER; note = 2'-fluoro nucleoside with phosphorothioate bond
  modified_base 3: mod_base = OTHER; note = 2'-O-methoxy nucleoside
  modified_base 4: mod_base = OTHER; note = 2'-fluoro nucleoside
  modified_base 5: mod_base = OTHER; note = 2'-O-methoxy nucleoside
  modified_base 6: mod_base = OTHER; note = 2'-fluoro nucleoside
  modified_base 7: mod_base = OTHER; note = 2'-O-methoxy nucleoside
  modified_base 8: mod_base = OTHER; note = 2'-fluoro nucleoside
  modified_base 9: mod_base = OTHER; note = 2'-O-methoxy nucleoside
  modified_base 10: mod_base = OTHER; note = 2'-fluoro nucleoside
  modified_base 11: mod_base = OTHER; note = 2'-O-methoxy nucleoside
  modified_base 12: mod_base = OTHER; note = 2'-fluoro nucleoside
  modified_base 13: mod_base = OTHER; note = 2'-O-methoxy nucleoside
  modified_base 14: mod_base = OTHER; note = 2'-fluoro nucleoside
  modified_base 15: mod_base = OTHER; note = 2'-O-methoxy nucleoside
  modified_base 16: mod_base = OTHER; note = 2'-fluoro nucleoside
  modified_base 17: mod_base = OTHER; note = 2'-O-methoxy nucleoside
  modified_base 18: mod_base = OTHER; note = 2'-fluoro nucleoside
  modified_base 19: mod_base = OTHER; note = 2'-O-methoxy nucleoside
  modified_base 20: mod_base = OTHER; note = 2'-fluoro nucleoside
  modified_base 21: mod_base = OTHER; note = 2'-O-methoxy nucleoside with phosphorothioate bond
  modified_base 22: mod_base = OTHER; note = 2'-fluoro nucleoside with phosphorothioate bond
  modified_base 23: mod_base = OTHER; note = 2'-O-methoxy nucleoside
aaggcaacagagaggacagaccc

SEQ ID NO: 337 - RNA, 21 nt, synthetic construct
  source 1..21: mol_type = other RNA
  modified_base 1: mod_base = OTHER; note = 2'-O-methoxy nucleoside with phosphorothioate bond
  modified_base 2: mod_base = OTHER; note = 2'-O-methoxy nucleoside with phosphorothioate bond
  modified_base 3: mod_base = OTHER; note = 2'-O-methoxy nucleoside
  modified_base 4: mod_base = OTHER; note = 2'-O-methoxy nucleoside
  modified_base 5: mod_base = OTHER; note = 2'-O-methoxy nucleoside
  modified_base 6: mod_base = OTHER; note = 2'-O-methoxy nucleoside
  modified_base 7: mod_base = OTHER; note = 2'-fluoro nucleoside
  modified_base 8: mod_base = OTHER; note = 2'-O-methoxy nucleoside
  modified_base 9: mod_base = OTHER; note = 2'-fluoro nucleoside
  modified_base 10: mod_base = OTHER; note = 2'-fluoro nucleoside
  modified_base 11: mod_base = OTHER; note = 2'-fluoro nucleoside
  modified_base 12: mod_base = OTHER; note = 2'-O-methoxy nucleoside
  modified_base 13: mod_base = OTHER; note = 2'-O-methoxy nucleoside
  modified_base 14: mod_base = OTHER; note = 2'-O-methoxy nucleoside
  modified_base 15: mod_base = OTHER; note = 2'-O-methoxy nucleoside
  modified_base 16: mod_base = OTHER; note = 2'-O-methoxy nucleoside
  modified_base 17: mod_base = OTHER; note = 2'-fluoro nucleoside
  modified_base 18: mod_base = OTHER; note = 2'-O-methoxy nucleoside
  modified_base 19: mod_base = OTHER; note = 2'-O-methoxy nucleoside
  modified_base 20: mod_base = OTHER; note = 2'-O-methoxy nucleoside
  modified_base 21: mod_base = OTHER; note = 2'-O-methoxy nucleoside
aagatcctgcatgtcttccat

SEQ ID NO: 338 - RNA, 21 nt, synthetic construct
  source 1..21: mol_type = other RNA
  modified_base 1: mod_base = OTHER; note = 2'-O-methoxy nucleoside with phosphorothioate bond
  modified_base 2: mod_base = OTHER; note = 2'-O-methoxy nucleoside with phosphorothioate bond
  modified_base 3: mod_base = OTHER; note = 2'-O-methoxy nucleoside
  modified_base 4: mod_base = OTHER; note = 2'-O-methoxy nucleoside
  modified_base 5: mod_base = OTHER; note = 2'-O-methoxy nucleoside
  modified_base 6: mod_base = OTHER; note = 2'-O-methoxy nucleoside
  modified_base 7: mod_base = OTHER; note = 2'-fluoro nucleoside
  modified_base 8: mod_base = OTHER; note = 2'-O-methoxy nucleoside
  modified_base 9: mod_base = OTHER; note = 2'-fluoro nucleoside
  modified_base 10: mod_base = OTHER; note = 2'-O-methoxy nucleoside
  modified_base 11: mod_base = OTHER; note = 2'-fluoro nucleoside
  modified_base 12: mod_base = OTHER; note = 2'-O-methoxy nucleoside
  modified_base 13: mod_base = OTHER; note = 2'-O-methoxy nucleoside
  modified_base 14: mod_base = OTHER; note = 2'-O-methoxy nucleoside
  modified_base 15: mod_base = OTHER; note = 2'-O-methoxy nucleoside
  modified_base 16: mod_base = OTHER; note = 2'-O-methoxy nucleoside
  modified_base 17: mod_base = OTHER; note = 2'-fluoro nucleoside
  modified_base 18: mod_base = OTHER; note = 2'-O-methoxy nucleoside
  modified_base 19: mod_base = OTHER; note = 2'-O-methoxy nucleoside
  modified_base 20: mod_base = OTHER; note = 2'-O-methoxy nucleoside
  modified_base 21: mod_base = OTHER; note = 2'-O-methoxy nucleoside
aagatcctgcatgtcttccat

SEQ ID NO: 339 - RNA, 21 nt, synthetic construct
  source 1..21: mol_type = other RNA
  modified_base 1: mod_base = OTHER; note = 2'-O-methoxy nucleoside with phosphorothioate bond
  modified_base 2: mod_base = OTHER; note = 2'-O-methoxy nucleoside with phosphorothioate bond
  modified_base 3: mod_base = OTHER; note = 2'-O-methoxy nucleoside
  modified_base 4: mod_base = OTHER; note = 2'-O-methoxy nucleoside
  modified_base 5: mod_base = OTHER; note = 2'-O-methoxy nucleoside
  modified_base 6: mod_base = OTHER; note = 2'-O-methoxy nucleoside
  modified_base 7: mod_base = OTHER; note = 2'-fluoro nucleoside
  modified_base 8: mod_base = OTHER; note = 2'-O-methoxy nucleoside
  modified_base 9: mod_base = OTHER; note = 2'-fluoro nucleoside
  modified_base 10: mod_base = OTHER; note = 2'-fluoro nucleoside
  modified_base 11: mod_base = OTHER; note = 2'-fluoro nucleoside
  modified_base 12: mod_base = OTHER; note = 2'-O-methoxy nucleoside
  modified_base 13: mod_base = OTHER; note = 2'-O-methoxy nucleoside
  modified_base 14: mod_base = OTHER; note = 2'-O-methoxy nucleoside
  modified_base 15: mod_base = OTHER; note = 2'-O-methoxy nucleoside
  modified_base 16: mod_base = OTHER; note = 2'-O-methoxy nucleoside
  modified_base 17: mod_base = OTHER; note = 2'-O-methoxy nucleoside
  modified_base 18: mod_base = OTHER; note = 2'-O-methoxy nucleoside
  modified_base 19: mod_base = OTHER; note = 2'-O-methoxy nucleoside
  modified_base 20: mod_base = OTHER; note = 2'-O-methoxy nucleoside
  modified_base 21: mod_base = OTHER; note = 2'-O-methoxy nucleoside
aagatcctgcatgtcttccat

SEQ ID NO: 340 - RNA, 21 nt, synthetic construct
  source 1..21: mol_type = other RNA
  modified_base 1: mod_base = OTHER; note = 2'-O-methoxy nucleoside with phosphorothioate bond
  modified_base 2: mod_base = OTHER; note = 2'-O-methoxy nucleoside with phosphorothioate bond
  modified_base 3: mod_base = OTHER; note = 2'-O-methoxy nucleoside
  modified_base 4: mod_base = OTHER; note = 2'-O-methoxy nucleoside
  modified_base 5: mod_base = OTHER; note = 2'-O-methoxy nucleoside
  modified_base 6: mod_base = OTHER; note = 2'-O-methoxy nucleoside
  modified_base 7: mod_base = OTHER; note = 2'-fluoro nucleoside
  modified_base 8: mod_base = OTHER; note = 2'-O-methoxy nucleoside
  modified_base 9: mod_base = OTHER; note = 2'-fluoro nucleoside
  modified_base 10: mod_base = OTHER; note = 2'-fluoro nucleoside
  modified_base 11: mod_base = OTHER; note = 2'-O-methoxy nucleoside
  modified_base 12: mod_base = OTHER; note = 2'-O-methoxy nucleoside
  modified_base 13: mod_base = OTHER; note = 2'-O-methoxy nucleoside
  modified_base 14: mod_base = OTHER; note = 2'-O-methoxy nucleoside
  modified_base 15: mod_base = OTHER; note = 2'-O-methoxy nucleoside
  modified_base 16: mod_base = OTHER; note = 2'-O-methoxy nucleoside
  modified_base 17: mod_base = OTHER; note = 2'-O-methoxy nucleoside
  modified_base 18: mod_base = OTHER; note = 2'-O-methoxy nucleoside
  modified_base 19: mod_base = OTHER; note = 2'-O-methoxy nucleoside
  modified_base 20: mod_base = OTHER; note = 2'-O-methoxy nucleoside
  modified_base 21: mod_base = OTHER; note = 2'-O-methoxy nucleoside
aagatcctgcatgtcttccat

SEQ ID NO: 341 - RNA, 21 nt, synthetic construct
  source 1..21: mol_type = other RNA
  modified_base 1: mod_base = OTHER; note = 2'-O-methoxy nucleoside with phosphorothioate bond
  modified_base 2: mod_base = OTHER; note = 2'-O-methoxy nucleoside with phosphorothioate bond
  modified_base 3: mod_base = OTHER; note = 2'-O-methoxy nucleoside
  modified_base 4: mod_base = OTHER; note = 2'-O-methoxy nucleoside
  modified_base 5: mod_base = OTHER; note = 2'-O-methoxy nucleoside
  modified_base 6: mod_base = OTHER; note = 2'-O-methoxy nucleoside
  modified_base 7: mod_base = OTHER; note = 2'-fluoro nucleoside
  modified_base 8: mod_base = OTHER; note = 2'-O-methoxy nucleoside
  modified_base 9: mod_base = OTHER; note = 2'-fluoro nucleoside
  modified_base 10: mod_base = OTHER; note = 2'-fluoro nucleoside
  modified_base 11: mod_base = OTHER; note = 2'-fluoro nucleoside
  modified_base 12: mod_base = OTHER; note = 2'-O-methoxy nucleoside
  modified_base 13: mod_base = OTHER; note = 2'-O-methoxy nucleoside
  modified_base 14: mod_base = OTHER; note = 2'-O-methoxy nucleoside
  modified_base 15: mod_base = OTHER; note = 2'-O-methoxy nucleoside
  modified_base 16: mod_base = OTHER; note = 2'-fluoro nucleoside
  modified_base 17: mod_base = OTHER; note = 2'-fluoro nucleoside
  modified_base 18: mod_base = OTHER; note = 2'-O-methoxy nucleoside
  modified_base 19: mod_base = OTHER; note = 2'-O-methoxy nucleoside
  modified_base 20: mod_base = OTHER; note = 2'-O-methoxy nucleoside
  modified_base 21: mod_base = OTHER; note = 2'-O-methoxy nucleoside
aagatcctgcatgtcttccat

SEQ ID NO: 342 - RNA, 21 nt, synthetic construct
  source 1..21: mol_type = other RNA
  modified_base 1: mod_base = OTHER; note = 2'-O-methoxy nucleoside with phosphorothioate bond
  modified_base 2: mod_base = OTHER; note = 2'-O-methoxy nucleoside with phosphorothioate bond
  modified_base 3: mod_base = OTHER; note = 2'-O-methoxy nucleoside
  modified_base 4: mod_base = OTHER; note = 2'-O-methoxy nucleoside
  modified_base 5: mod_base = OTHER; note = 2'-O-methoxy nucleoside
  modified_base 6: mod_base = OTHER; note = 2'-O-methoxy nucleoside
  modified_base 7: mod_base = OTHER; note = 2'-fluoro nucleoside
  modified_base 8: mod_base = OTHER; note = 2'-O-methoxy nucleoside
  modified_base 9: mod_base = OTHER; note = 2'-fluoro nucleoside
  modified_base 10: mod_base = OTHER; note = 2'-fluoro nucleoside
  modified_base 11: mod_base = OTHER; note = 2'-fluoro nucleoside
  modified_base 12: mod_base = OTHER; note = 2'-O-methoxy nucleoside
  modified_base 13: mod_base = OTHER; note = 2'-O-methoxy nucleoside
  modified_base 14: mod_base = OTHER; note = 2'-O-methoxy nucleoside
  modified_base 15: mod_base = OTHER; note = 2'-O-methoxy nucleoside
  modified_base 16: mod_base = OTHER; note = 2'-O-methoxy nucleoside
  modified_base 17: mod_base = OTHER; note = 2'-fluoro nucleoside
  modified_base 18: mod_base = OTHER; note = 2'-O-methoxy nucleoside
  modified_base 19: mod_base = OTHER; note = 2'-O-methoxy nucleoside
  modified_base 20: mod_base = OTHER; note = 2'-O-methoxy nucleoside
  modified_base 21: mod_base = OTHER; note = 2'-O-methoxy nucleoside
tggaggcttagctttctggat

SEQ ID NO: 343 - RNA, 21 nt, synthetic construct
  source 1..21: mol_type = other RNA
  modified_base 1: mod_base = OTHER; note = 2'-O-methoxy nucleoside with phosphorothioate bond
  modified_base 2: mod_base = OTHER; note = 2'-O-methoxy nucleoside with phosphorothioate bond
  modified_base 3: mod_base = OTHER; note = 2'-O-methoxy nucleoside
  modified_base 4: mod_base = OTHER; note = 2'-O-methoxy nucleoside
  modified_base 5: mod_base = OTHER; note = 2'-O-methoxy nucleoside
  modified_base 6: mod_base = OTHER; note = 2'-O-methoxy nucleoside
  modified_base 7: mod_base = OTHER; note = 2'-fluoro nucleoside
  modified_base 8: mod_base = OTHER; note = 2'-O-methoxy nucleoside
  modified_base 9: mod_base = OTHER; note = 2'-fluoro nucleoside
  modified_base 10: mod_base = OTHER; note = 2'-O-methoxy nucleoside
  modified_base 11: mod_base = OTHER; note = 2'-fluoro nucleoside
  modified_base 12: mod_base = OTHER; note = 2'-O-methoxy nucleoside
  modified_base 13: mod_base = OTHER; note = 2'-O-methoxy nucleoside
  modified_base 14: mod_base = OTHER; note = 2'-O-methoxy nucleoside
  modified_base 15: mod_base = OTHER; note = 2'-O-methoxy nucleoside
  modified_base 16: mod_base = OTHER; note = 2'-O-methoxy nucleoside
  modified_base 17: mod_base = OTHER; note = 2'-fluoro nucleoside
  modified_base 18: mod_base = OTHER; note = 2'-O-methoxy nucleoside
  modified_base 19: mod_base = OTHER; note = 2'-O-methoxy nucleoside
  modified_base 20: mod_base = OTHER; note = 2'-O-methoxy nucleoside
  modified_base 21: mod_base = OTHER; note = 2'-O-methoxy nucleoside
tggaggcttagctttctggat

SEQ ID NO: 344 - RNA, 21 nt, synthetic construct
  source 1..21: mol_type = other RNA
  modified_base 1: mod_base = OTHER; note = 2'-O-methoxy nucleoside with phosphorothioate bond
  modified_base 2: mod_base = OTHER; note = 2'-O-methoxy nucleoside with phosphorothioate bond
  modified_base 3: mod_base = OTHER; note = 2'-O-methoxy nucleoside
  modified_base 4: mod_base = OTHER; note = 2'-O-methoxy nucleoside
  modified_base 5: mod_base = OTHER; note = 2'-O-methoxy nucleoside
  modified_base 6: mod_base = OTHER; note = 2'-O-methoxy nucleoside
  modified_base 7: mod_base = OTHER; note = 2'-fluoro nucleoside
  modified_base 8: mod_base = OTHER; note = 2'-O-methoxy nucleoside
  modified_base 9: mod_base = OTHER; note = 2'-fluoro nucleoside
  modified_base 10: mod_base = OTHER; note = 2'-fluoro nucleoside
  modified_base 11: mod_base = OTHER; note = 2'-fluoro nucleoside
  modified_base 12: mod_base = OTHER; note = 2'-O-methoxy nucleoside
  modified_base 13: mod_base = OTHER; note = 2'-O-methoxy nucleoside
  modified_base 14: mod_base = OTHER; note = 2'-O-methoxy nucleoside
  modified_base 15: mod_base = OTHER; note = 2'-O-methoxy nucleoside
  modified_base 16: mod_base = OTHER; note = 2'-O-methoxy nucleoside
  modified_base 17: mod_base = OTHER; note = 2'-O-methoxy nucleoside
  modified_base 18: mod_base = OTHER; note = 2'-O-methoxy nucleoside
  modified_base 19: mod_base = OTHER; note = 2'-O-methoxy nucleoside
  modified_base 20: mod_base = OTHER; note = 2'-O-methoxy nucleoside
  modified_base 21: mod_base = OTHER; note = 2'-O-methoxy nucleoside
tggaggcttagctttctggat

SEQ ID NO: 345 - RNA, 21 nt, synthetic construct
  source 1..21: mol_type = other RNA
  modified_base 1: mod_base = OTHER; note = 2'-O-methoxy nucleoside with phosphorothioate bond
  modified_base 2: mod_base = OTHER; note = 2'-O-methoxy nucleoside with phosphorothioate bond
  modified_base 3: mod_base = OTHER; note = 2'-O-methoxy nucleoside
  modified_base 4: mod_base = OTHER; note = 2'-O-methoxy nucleoside
  modified_base 5: mod_base = OTHER; note = 2'-O-methoxy nucleoside
  modified_base 6: mod_base = OTHER; note = 2'-O-methoxy nucleoside
  modified_base 7: mod_base = OTHER; note = 2'-fluoro nucleoside
  modified_base 8: mod_base = OTHER; note = 2'-O-methoxy nucleoside
  modified_base 9: mod_base = OTHER; note = 2'-fluoro nucleoside
  modified_base 10: mod_base = OTHER; note = 2'-fluoro nucleoside
  modified_base 11: mod_base = OTHER; note = 2'-O-methoxy nucleoside
  modified_base 12: mod_base = OTHER; note = 2'-O-methoxy nucleoside
  modified_base 13: mod_base = OTHER; note = 2'-O-methoxy nucleoside
  modified_base 14: mod_base = OTHER; note = 2'-O-methoxy nucleoside
  modified_base 15: mod_base = OTHER; note = 2'-O-methoxy nucleoside
  modified_base 16: mod_base = OTHER; note = 2'-O-methoxy nucleoside
  modified_base 17: mod_base = OTHER; note = 2'-O-methoxy nucleoside
  modified_base 18: mod_base = OTHER; note = 2'-O-methoxy nucleoside
  modified_base 19: mod_base = OTHER; note = 2'-O-methoxy nucleoside
  modified_base 20: mod_base = OTHER; note = 2'-O-methoxy nucleoside
  modified_base 21: mod_base = OTHER; note = 2'-O-methoxy nucleoside
tggaggcttagctttctggat

SEQ ID NO: 346 - RNA, 21 nt, synthetic construct
  source 1..21: mol_type = other RNA
  modified_base 1: mod_base = OTHER; note = 2'-O-methoxy nucleoside with phosphorothioate bond
  modified_base 2: mod_base = OTHER; note = 2'-O-methoxy nucleoside with phosphorothioate bond
  modified_base 3: mod_base = OTHER; note = 2'-O-methoxy nucleoside
  modified_base 4: mod_base = OTHER; note = 2'-O-methoxy nucleoside
  modified_base 5: mod_base = OTHER; note = 2'-O-methoxy nucleoside
  modified_base 6: mod_base = OTHER; note = 2'-O-methoxy nucleoside
  modified_base 7: mod_base = OTHER; note = 2'-fluoro nucleoside
  modified_base 8: mod_base = OTHER; note = 2'-O-methoxy nucleoside
  modified_base 9: mod_base = OTHER; note = 2'-fluoro nucleoside
  modified_base 10: mod_base = OTHER; note = 2'-fluoro nucleoside
  modified_base 11: mod_base = OTHER; note = 2'-fluoro nucleoside
  modified_base 12: mod_base = OTHER; note = 2'-O-methoxy nucleoside
  modified_base 13: mod_base = OTHER; note = 2'-O-methoxy nucleoside
  modified_base 14: mod_base = OTHER; note = 2'-O-methoxy nucleoside
  modified_base 15: mod_base = OTHER; note = 2'-O-methoxy nucleoside
  modified_base 16: mod_base = OTHER; note = 2'-fluoro nucleoside
  modified_base 17: mod_base = OTHER; note = 2'-fluoro nucleoside
  modified_base 18: mod_base = OTHER; note = 2'-O-methoxy nucleoside
  modified_base 19: mod_base = OTHER; note = 2'-O-methoxy nucleoside
  modified_base 20: mod_base = OTHER; note = 2'-O-methoxy nucleoside
  modified_base 21: mod_base = OTHER; note = 2'-O-methoxy nucleoside
tggaggcttagctttctggat

SEQ ID NO: 347 - RNA, 21 nt, synthetic construct
  source 1..21: mol_type = other RNA
  modified_base 1: mod_base = OTHER; note = 2'-O-methoxy nucleoside with phosphorothioate bond
  modified_base 2: mod_base = OTHER; note = 2'-O-methoxy nucleoside with phosphorothioate bond
  modified_base 3: mod_base = OTHER; note = 2'-O-methoxy nucleoside
  modified_base 4: mod_base = OTHER; note = 2'-O-methoxy nucleoside
  modified_base 5: mod_base = OTHER; note = 2'-O-methoxy nucleoside
  modified_base 6: mod_base = OTHER; note = 2'-O-methoxy nucleoside
  modified_base 7: mod_base = OTHER; note = 2'-fluoro nucleoside
  modified_base 8: mod_base = OTHER; note = 2'-O-methoxy nucleoside
  modified_base 9: mod_base = OTHER; note = 2'-fluoro nucleoside
  modified_base 10: mod_base = OTHER; note = 2'-fluoro nucleoside
  modified_base 11: mod_base = OTHER; note = 2'-fluoro nucleoside
  modified_base 12: mod_base = OTHER; note = 2'-O-methoxy nucleoside
  modified_base 13: mod_base = OTHER; note = 2'-O-methoxy nucleoside
  modified_base 14: mod_base = OTHER; note = 2'-O-methoxy nucleoside
  modified_base 15: mod_base = OTHER; note = 2'-O-methoxy nucleoside
  modified_base 16: mod_base = OTHER; note = 2'-O-methoxy nucleoside
  modified_base 17: mod_base = OTHER; note = 2'-fluoro nucleoside
  modified_base 18: mod_base = OTHER; note = 2'-O-methoxy nucleoside
  modified_base 19: mod_base = OTHER; note = 2'-O-methoxy nucleoside
  modified_base 20: mod_base = OTHER; note = 2'-O-methoxy nucleoside
  modified_base 21: mod_base = OTHER; note = 2'-O-methoxy nucleoside
cttttgtaacttgaagatatt

SEQ ID NO: 348 - RNA, 21 nt, synthetic construct
  source 1..21: mol_type = other RNA
  modified_base 1: mod_base = OTHER; note = 2'-O-methoxy nucleoside with phosphorothioate bond
  modified_base 2: mod_base = OTHER; note = 2'-O-methoxy nucleoside with phosphorothioate bond
  modified_base 3: mod_base = OTHER; note = 2'-O-methoxy nucleoside
  modified_base 4: mod_base = OTHER; note = 2'-O-methoxy nucleoside
  modified_base 5: mod_base = OTHER; note = 2'-O-methoxy nucleoside
  modified_base 6: mod_base = OTHER; note = 2'-O-methoxy nucleoside
  modified_base 7: mod_base = OTHER; note = 2'-fluoro nucleoside
  modified_base 8: mod_base = OTHER; note = 2'-O-methoxy nucleoside
  modified_base 9: mod_base = OTHER; note = 2'-fluoro nucleoside
  modified_base 10: mod_base = OTHER; note = 2'-O-methoxy nucleoside
  modified_base 11: mod_base = OTHER; note = 2'-fluoro nucleoside
  modified_base 12: mod_base = OTHER; note = 2'-O-methoxy nucleoside
  modified_base 13: mod_base = OTHER; note = 2'-O-methoxy nucleoside
  modified_base 14: mod_base = OTHER; note = 2'-O-methoxy nucleoside
  modified_base 15: mod_base = OTHER; note = 2'-O-methoxy nucleoside
  modified_base 16: mod_base = OTHER; note = 2'-O-methoxy nucleoside
  modified_base 17: mod_base = OTHER; note = 2'-fluoro nucleoside
  modified_base 18: mod_base = OTHER; note = 2'-O-methoxy nucleoside
  modified_base 19: mod_base = OTHER; note = 2'-O-methoxy nucleoside
  modified_base 20: mod_base = OTHER; note = 2'-O-methoxy nucleoside
  modified_base 21: mod_base = OTHER; note = 2'-O-methoxy nucleoside
cttttgtaacttgaagatatt

SEQ ID NO: 349 - RNA, 21 nt, synthetic construct
  source 1..21: mol_type = other RNA
  modified_base 1: mod_base = OTHER; note = 2'-O-methoxy nucleoside with phosphorothioate bond
  modified_base 2: mod_base = OTHER; note = 2'-O-methoxy nucleoside with phosphorothioate bond
  modified_base 3: mod_base = OTHER; note = 2'-O-methoxy nucleoside
  modified_base 4: mod_base = OTHER; note = 2'-O-methoxy nucleoside
  modified_base 5: mod_base = OTHER; note = 2'-O-methoxy nucleoside
  modified_base 6: mod_base = OTHER; note = 2'-O-methoxy nucleoside
  modified_base 7: mod_base = OTHER; note = 2'-fluoro nucleoside
  modified_base 8: mod_base = OTHER; note = 2'-O-methoxy nucleoside
  modified_base 9: mod_base = OTHER; note = 2'-fluoro nucleoside
  modified_base 10: mod_base = OTHER; note = 2'-fluoro nucleoside
  modified_base 11: mod_base = OTHER; note = 2'-fluoro nucleoside
  modified_base 12: mod_base = OTHER; note = 2'-O-methoxy nucleoside
  modified_base 13: mod_base = OTHER; note = 2'-O-methoxy nucleoside
  modified_base 14: mod_base = OTHER; note = 2'-O-methoxy nucleoside
  modified_base 15: mod_base = OTHER; note = 2'-O-methoxy nucleoside
  modified_base 16: mod_base = OTHER; note = 2'-O-methoxy nucleoside
  modified_base 17: mod_base = OTHER; note = 2'-O-methoxy nucleoside
  modified_base 18: mod_base = OTHER; note = 2'-O-methoxy nucleoside
  modified_base 19: mod_base = OTHER; note = 2'-O-methoxy nucleoside
  modified_base 20: mod_base = OTHER; note = 2'-O-methoxy nucleoside
  modified_base 21: mod_base = OTHER; note = 2'-O-methoxy nucleoside
cttttgtaacttgaagatatt

SEQ ID NO: 350 - RNA, 21 nt, synthetic construct
  source 1..21: mol_type = other RNA
  modified_base 1: mod_base = OTHER; note = 2'-O-methoxy nucleoside with phosphorothioate bond
  modified_base 2: mod_base = OTHER; note = 2'-O-methoxy nucleoside with phosphorothioate bond
  modified_base 3: mod_base = OTHER; note = 2'-O-methoxy nucleoside
  modified_base 4: mod_base = OTHER; note = 2'-O-methoxy nucleoside
  modified_base 5: mod_base = OTHER; note = 2'-O-methoxy nucleoside
  modified_base 6: mod_base = OTHER; note = 2'-O-methoxy nucleoside
  modified_base 7: mod_base = OTHER; note = 2'-fluoro nucleoside
  modified_base 8: mod_base = OTHER; note = 2'-O-methoxy nucleoside
  modified_base 9: mod_base = OTHER; note = 2'-fluoro nucleoside
  modified_base 10: mod_base = OTHER; note = 2'-fluoro nucleoside
  modified_base 11: mod_base = OTHER; note = 2'-O-methoxy nucleoside
  modified_base 12: mod_base = OTHER; note = 2'-O-methoxy nucleoside
  modified_base 13: mod_base = OTHER; note = 2'-O-methoxy nucleoside
  modified_base 14: mod_base = OTHER; note = 2'-O-methoxy nucleoside
  modified_base 15: mod_base = OTHER; note = 2'-O-methoxy nucleoside
  modified_base 16: mod_base = OTHER; note = 2'-O-methoxy nucleoside
  modified_base 17: mod_base = OTHER; note = 2'-O-methoxy nucleoside
  modified_base 18: mod_base = OTHER; note = 2'-O-methoxy nucleoside
  modified_base 19: mod_base = OTHER; note = 2'-O-methoxy nucleoside
  modified_base 20: mod_base = OTHER; note = 2'-O-methoxy nucleoside
  modified_base 21: mod_base = OTHER; note = 2'-O-methoxy nucleoside
cttttgtaacttgaagatatt

SEQ ID NO: 351 - RNA, 21 nt, synthetic construct
  source 1..21: mol_type = other RNA
  modified_base 1: mod_base = OTHER; note = 2'-O-methoxy nucleoside with phosphorothioate bond
  modified_base 2: mod_base = OTHER; note = 2'-O-methoxy nucleoside with phosphorothioate bond
  modified_base 3: mod_base = OTHER; note = 2'-O-methoxy nucleoside
  modified_base 4: mod_base = OTHER; note = 2'-O-methoxy nucleoside
  modified_base 5: mod_base = OTHER; note = 2'-O-methoxy nucleoside
  modified_base 6: mod_base = OTHER; note = 2'-O-methoxy nucleoside
  modified_base 7: mod_base = OTHER; note = 2'-fluoro nucleoside
  modified_base 8: mod_base = OTHER; note = 2'-O-methoxy nucleoside
  modified_base 9: mod_base = OTHER; note = 2'-fluoro nucleoside
  modified_base 10: mod_base = OTHER; note = 2'-fluoro nucleoside
  modified_base 11: mod_base = OTHER; note = 2'-fluoro nucleoside
  modified_base 12: mod_base = OTHER; note = 2'-O-methoxy nucleoside
  modified_base 13: mod_base = OTHER; note = 2'-O-methoxy nucleoside
  modified_base 14: mod_base = OTHER; note = 2'-O-methoxy nucleoside
  modified_base 15: mod_base = OTHER; note = 2'-O-methoxy nucleoside
  modified_base 16: mod_base = OTHER; note = 2'-fluoro nucleoside
  modified_base 17: mod_base = OTHER; note = 2'-fluoro nucleoside
  modified_base 18: mod_base = OTHER; note = 2'-O-methoxy nucleoside
  modified_base 19: mod_base = OTHER; note = 2'-O-methoxy nucleoside
  modified_base 20: mod_base = OTHER; note = 2'-O-methoxy nucleoside
  modified_base 21: mod_base = OTHER; note = 2'-O-methoxy nucleoside
cttttgtaacttgaagatatt

SEQ ID NO: 352 - RNA, 21 nt, synthetic construct
  source 1..21: mol_type = other RNA
  modified_base 1: mod_base = OTHER; note = 2'-O-methoxy nucleoside with phosphorothioate bond
  modified_base 2: mod_base = OTHER; note = 2'-O-methoxy nucleoside with phosphorothioate bond
  modified_base 3: mod_base = OTHER; note = 2'-O-methoxy nucleoside
  modified_base 4: mod_base = OTHER; note = 2'-O-methoxy nucleoside
  modified_base 5: mod_base = OTHER; note = 2'-O-methoxy nucleoside
  modified_base 6: mod_base = OTHER; note = 2'-O-methoxy nucleoside
  modified_base 7: mod_base = OTHER; note = 2'-fluoro nucleoside
  modified_base 8: mod_base = OTHER; note = 2'-O-methoxy nucleoside
  modified_base 9: mod_base = OTHER; note = 2'-fluoro nucleoside
  modified_base 10: mod_base = OTHER; note = 2'-fluoro nucleoside
  modified_base 11: mod_base = OTHER; note = 2'-fluoro nucleoside
  modified_base 12: mod_base = OTHER; note = 2'-O-methoxy nucleoside
  modified_base 13: mod_base = OTHER; note = 2'-O-methoxy nucleoside
  modified_base 14: mod_base = OTHER; note = 2'-O-methoxy nucleoside
  modified_base 15: mod_base = OTHER; note = 2'-O-methoxy nucleoside
  modified_base 16: mod_base = OTHER; note = 2'-O-methoxy nucleoside
  modified_base 17: mod_base = OTHER; note = 2'-fluoro nucleoside
  modified_base 18: mod_base = OTHER; note = 2'-O-methoxy nucleoside
  modified_base 19: mod_base = OTHER; note = 2'-O-methoxy nucleoside
  modified_base 20: mod_base = OTHER; note = 2'-O-methoxy nucleoside
  modified_base 21: mod_base = OTHER; note = 2'-O-methoxy nucleoside
gaagatatttattctgggttt

SEQ ID NO: 353 - RNA, 21 nt, synthetic construct
  source 1..21: mol_type = other RNA
  modified_base 1: mod_base = OTHER; note = 2'-O-methoxy nucleoside with phosphorothioate bond
  modified_base 2: mod_base = OTHER; note = 2'-O-methoxy nucleoside with phosphorothioate bond
  modified_base 3: mod_base = OTHER; note = 2'-O-methoxy nucleoside
  modified_base 4: mod_base = OTHER; note = 2'-O-methoxy nucleoside
  modified_base 5: mod_base = OTHER; note = 2'-O-methoxy nucleoside
  modified_base 6: mod_base = OTHER; note = 2'-O-methoxy nucleoside
  modified_base 7: mod_base = OTHER; note = 2'-fluoro nucleoside
  modified_base 8: mod_base = OTHER; note = 2'-O-methoxy nucleoside
  modified_base 9: mod_base = OTHER; note = 2'-fluoro nucleoside
  modified_base 10: mod_base = OTHER; note = 2'-O-methoxy nucleoside
  modified_base 11: mod_base = OTHER; note = 2'-fluoro nucleoside
  modified_base 12: mod_base = OTHER; note = 2'-O-methoxy nucleoside
  modified_base 13: mod_base = OTHER; note = 2'-O-methoxy nucleoside
  modified_base 14: mod_base = OTHER; note = 2'-O-methoxy nucleoside
  modified_base 15: mod_base = OTHER; note = 2'-O-methoxy nucleoside
  modified_base 16: mod_base = OTHER; note = 2'-O-methoxy nucleoside
  modified_base 17: mod_base = OTHER; note = 2'-fluoro nucleoside
  modified_base 18: mod_base = OTHER; note = 2'-O-methoxy nucleoside
  modified_base 19: mod_base = OTHER; note = 2'-O-methoxy nucleoside
  modified_base 20: mod_base = OTHER; note = 2'-O-methoxy nucleoside
  modified_base 21: mod_base = OTHER; note = 2'-O-methoxy nucleoside
gaagatatttattctgggttt

SEQ ID NO: 354 - RNA, 21 nt, synthetic construct
  source 1..21: mol_type = other RNA
  modified_base 1: mod_base = OTHER; note = 2'-O-methoxy nucleoside with phosphorothioate bond
  modified_base 2: mod_base = OTHER; note = 2'-O-methoxy nucleoside with phosphorothioate bond
  modified_base 3: mod_base = OTHER; note = 2'-O-methoxy nucleoside
  modified_base 4: mod_base = OTHER; note = 2'-O-methoxy nucleoside
  modified_base 5: mod_base = OTHER; note = 2'-O-methoxy nucleoside
  modified_base 6: mod_base = OTHER; note = 2'-O-methoxy nucleoside
  modified_base 7: mod_base = OTHER; note = 2'-fluoro nucleoside
  modified_base 8: mod_base = OTHER; note = 2'-O-methoxy nucleoside
  modified_base 9: mod_base = OTHER; note = 2'-fluoro nucleoside
  modified_base 10: mod_base = OTHER; note = 2'-fluoro nucleoside
  modified_base 11: mod_base = OTHER; note = 2'-fluoro nucleoside
  modified_base 12: mod_base = OTHER; note = 2'-O-methoxy nucleoside
  modified_base 13: mod_base = OTHER; note = 2'-O-methoxy nucleoside
  modified_base 14: mod_base = OTHER; note = 2'-O-methoxy nucleoside
  modified_base 15: mod_base = OTHER; note = 2'-O-methoxy nucleoside
  modified_base 16: mod_base = OTHER; note = 2'-O-methoxy nucleoside
  modified_base 17: mod_base = OTHER; note = 2'-O-methoxy nucleoside
  modified_base 18: mod_base = OTHER; note = 2'-O-methoxy nucleoside
  modified_base 19: mod_base = OTHER; note = 2'-O-methoxy nucleoside
  modified_base 20: mod_base = OTHER; note = 2'-O-methoxy nucleoside
  modified_base 21: mod_base = OTHER; note = 2'-O-methoxy nucleoside
gaagatatttattctgggttt

SEQ ID NO: 355 - RNA, 21 nt, synthetic construct
  source 1..21: mol_type = other RNA
  modified_base 1: mod_base = OTHER; note = 2'-O-methoxy nucleoside with phosphorothioate bond
  modified_base 2: mod_base = OTHER; note = 2'-O-methoxy nucleoside with phosphorothioate bond
  modified_base 3: mod_base = OTHER; note = 2'-O-methoxy nucleoside
  modified_base 4: mod_base = OTHER; note = 2'-O-methoxy nucleoside
  modified_base 5: mod_base = OTHER; note = 2'-O-methoxy nucleoside
  modified_base 6: mod_base = OTHER; note = 2'-O-methoxy nucleoside
  modified_base 7: mod_base = OTHER; note = 2'-fluoro nucleoside
  modified_base 8: mod_base = OTHER; note = 2'-O-methoxy nucleoside
  modified_base 9: mod_base = OTHER; note = 2'-fluoro nucleoside
  modified_base 10: mod_base = OTHER; note = 2'-fluoro nucleoside
  modified_base 11: mod_base = OTHER; note = 2'-O-methoxy nucleoside
  modified_base 12: mod_base = OTHER; note = 2'-O-methoxy nucleoside
  modified_base 13: mod_base = OTHER; note = 2'-O-methoxy nucleoside
  modified_base 14: mod_base = OTHER; note = 2'-O-methoxy nucleoside
  modified_base 15: mod_base = OTHER; note = 2'-O-methoxy nucleoside
  modified_base 16: mod_base = OTHER; note = 2'-O-methoxy nucleoside
  modified_base 17: mod_base = OTHER; note = 2'-O-methoxy nucleoside
  modified_base 18: mod_base = OTHER; note = 2'-O-methoxy nucleoside
  modified_base 19: mod_base = OTHER; note = 2'-O-methoxy nucleoside
  modified_base 20: mod_base = OTHER; note = 2'-O-methoxy nucleoside
  modified_base 21: mod_base = OTHER; note = 2'-O-methoxy nucleoside
gaagatatttattctgggttt

SEQ ID NO: 356 - RNA, 21 nt, synthetic construct
  source 1..21: mol_type = other RNA
  modified_base 1: mod_base = OTHER; note = 2'-O-methoxy nucleoside with phosphorothioate bond
  modified_base 2: mod_base = OTHER; note = 2'-O-methoxy nucleoside with phosphorothioate bond
  modified_base 3: mod_base = OTHER; note = 2'-O-methoxy nucleoside
  modified_base 4: mod_base = OTHER; note = 2'-O-methoxy nucleoside
  modified_base 5: mod_base = OTHER; note = 2'-O-methoxy nucleoside
  modified_base 6: mod_base = OTHER; note = 2'-O-methoxy nucleoside
  modified_base 7: mod_base = OTHER; note = 2'-fluoro nucleoside
  modified_base 8: mod_base = OTHER; note = 2'-O-methoxy nucleoside
  modified_base 9: mod_base = OTHER; note = 2'-fluoro nucleoside
  modified_base 10: mod_base = OTHER; note = 2'-fluoro nucleoside
  modified_base 11: mod_base = OTHER; note = 2'-fluoro nucleoside
  modified_base 12: mod_base = OTHER; note = 2'-O-methoxy nucleoside
  modified_base 13: mod_base = OTHER; note = 2'-O-methoxy nucleoside
  modified_base 14: mod_base = OTHER; note = 2'-O-methoxy nucleoside
  modified_base 15: mod_base = OTHER; note = 2'-O-methoxy nucleoside
  modified_base 16: mod_base = OTHER; note = 2'-fluoro nucleoside
  modified_base 17: mod_base = OTHER; note = 2'-fluoro nucleoside
  modified_base 18: mod_base = OTHER; note = 2'-O-methoxy nucleoside
  modified_base 19: mod_base = OTHER; note = 2'-O-methoxy nucleoside
  modified_base 20: mod_base = OTHER; note = 2'-O-methoxy nucleoside
  modified_base 21: mod_base = OTHER; note = 2'-O-methoxy nucleoside
gaagatatttattctgggttt

SEQ ID NO: 357 - RNA, 21 nt, synthetic construct
  source 1..21: mol_type = other RNA
  modified_base 1: mod_base = OTHER; note = 2'-O-methoxy nucleoside with phosphorothioate bond
  modified_base 2: mod_base = OTHER; note = 2'-O-methoxy nucleoside with phosphorothioate bond
  modified_base 3: mod_base = OTHER; note = 2'-O-methoxy nucleoside
  modified_base 4: mod_base = OTHER; note = 2'-O-methoxy nucleoside
  modified_base 5: mod_base = OTHER; note = 2'-O-methoxy nucleoside
  modified_base 6: mod_base = OTHER; note = 2'-O-methoxy nucleoside
  modified_base 7: mod_base = OTHER; note = 2'-fluoro nucleoside
  modified_base 8: mod_base = OTHER; note = 2'-O-methoxy nucleoside
  modified_base 9: mod_base = OTHER; note = 2'-fluoro nucleoside
  modified_base 10: mod_base = OTHER; note = 2'-fluoro nucleoside
  modified_base 11: mod_base = OTHER; note = 2'-fluoro nucleoside
  modified_base 12: mod_base = OTHER; note = 2'-O-methoxy nucleoside
  modified_base 13: mod_base = OTHER; note = 2'-O-methoxy nucleoside
  modified_base 14: mod_base = OTHER; note = 2'-O-methoxy nucleoside
  modified_base 15: mod_base = OTHER; note = 2'-O-methoxy nucleoside
  modified_base 16: mod_base = OTHER; note = 2'-O-methoxy nucleoside
  modified_base 17: mod_base = OTHER; note = 2'-fluoro nucleoside
  modified_base 18: mod_base = OTHER; note = 2'-O-methoxy nucleoside
  modified_base 19: mod_base = OTHER; note = 2'-O-methoxy nucleoside
  modified_base 20: mod_base = OTHER; note = 2'-O-methoxy nucleoside
  modified_base 21: mod_base = OTHER; note = 2'-O-methoxy nucleoside
gttttgtagcatttttattaa

SEQ ID NO: 358 - RNA, 21 nt, synthetic construct
  source 1..21: mol_type = other RNA
  modified_base 1: mod_base = OTHER; note = 2'-O-methoxy nucleoside with phosphorothioate bond
  modified_base 2: mod_base = OTHER; note = 2'-O-methoxy nucleoside with phosphorothioate bond
  modified_base 3: mod_base = OTHER; note = 2'-O-methoxy nucleoside
  modified_base 4: mod_base = OTHER; note = 2'-O-methoxy nucleoside
  modified_base 5: mod_base = OTHER; note = 2'-O-methoxy nucleoside
  modified_base 6: mod_base = OTHER; note = 2'-O-methoxy nucleoside
  modified_base 7: mod_base = OTHER; note = 2'-fluoro nucleoside
  modified_base 8: mod_base = OTHER; note = 2'-O-methoxy nucleoside
  modified_base 9: mod_base = OTHER; note = 2'-fluoro nucleoside
  modified_base 10: mod_base = OTHER; note = 2'-O-methoxy nucleoside
  modified_base 11: mod_base = OTHER; note = 2'-fluoro nucleoside
  modified_base 12: mod_base = OTHER; note = 2'-O-methoxy nucleoside
  modified_base 13: mod_base = OTHER; note = 2'-O-methoxy nucleoside
  modified_base 14: mod_base = OTHER; note = 2'-O-methoxy nucleoside
  modified_base 15: mod_base = OTHER; note = 2'-O-methoxy nucleoside
  modified_base 16: mod_base = OTHER; note = 2'-O-methoxy nucleoside
  modified_base 17: mod_base = OTHER; note = 2'-fluoro nucleoside
  modified_base 18: mod_base = OTHER; note = 2'-O-methoxy nucleoside
  modified_base 19: mod_base = OTHER; note = 2'-O-methoxy nucleoside
  modified_base 20: mod_base = OTHER; note = 2'-O-methoxy nucleoside
  modified_base 21: mod_base = OTHER; note = 2'-O-methoxy nucleoside
gttttgtagcatttttattaa

SEQ ID NO: 359 - RNA, 21 nt, synthetic construct
  source 1..21: mol_type = other RNA
  modified_base 1: mod_base = OTHER; note = 2'-O-methoxy nucleoside with phosphorothioate bond
  modified_base 2: mod_base = OTHER; note = 2'-O-methoxy nucleoside with phosphorothioate bond
  modified_base 3: mod_base = OTHER; note = 2'-O-methoxy nucleoside
  modified_base 4: mod_base = OTHER; note = 2'-O-methoxy nucleoside
  modified_base 5: mod_base = OTHER; note = 2'-O-methoxy nucleoside
  modified_base 6: mod_base = OTHER; note = 2'-O-methoxy nucleoside
  modified_base 7: mod_base = OTHER; note = 2'-fluoro nucleoside
  modified_base 8: mod_base = OTHER; note = 2'-O-methoxy nucleoside
  modified_base 9: mod_base = OTHER; note = 2'-fluoro nucleoside
  modified_base 10: mod_base = OTHER; note = 2'-fluoro nucleoside
  modified_base 11: mod_base = OTHER; note = 2'-fluoro nucleoside
  modified_base 12: mod_base = OTHER; note = 2'-O-methoxy nucleoside
  modified_base 13: mod_base = OTHER; note = 2'-O-methoxy nucleoside
  modified_base 14: mod_base = OTHER; note = 2'-O-methoxy nucleoside
  modified_base 15: mod_base = OTHER; note = 2'-O-methoxy nucleoside
  modified_base 16: mod_base = OTHER; note = 2'-O-methoxy nucleoside
  modified_base 17: mod_base = OTHER; note = 2'-O-methoxy nucleoside
  modified_base 18: mod_base = OTHER; note = 2'-O-methoxy nucleoside
  modified_base 19: mod_base = OTHER; note = 2'-O-methoxy nucleoside
  modified_base 20: mod_base = OTHER; note = 2'-O-methoxy nucleoside
  modified_base 21: mod_base = OTHER; note = 2'-O-methoxy nucleoside
gttttgtagcatttttattaa

SEQ ID NO: 360 - RNA, 21 nt, synthetic construct
  source 1..21: mol_type = other RNA
  modified_base 1: mod_base = OTHER; note = 2'-O-methoxy nucleoside with phosphorothioate bond
  modified_base 2: mod_base = OTHER; note = 2'-O-methoxy nucleoside with phosphorothioate bond
  modified_base 3: mod_base = OTHER; note = 2'-O-methoxy nucleoside
  modified_base 4: mod_base = OTHER; note = 2'-O-methoxy nucleoside
  modified_base 5: mod_base = OTHER; note = 2'-O-methoxy nucleoside
  modified_base 6: mod_base = OTHER; note = 2'-O-methoxy nucleoside
  modified_base 7: mod_base = OTHER; note = 2'-fluoro nucleoside
  modified_base 8: mod_base = OTHER; note = 2'-O-methoxy nucleoside
  modified_base 9: mod_base = OTHER; note = 2'-fluoro nucleoside
  modified_base 10: mod_base = OTHER; note = 2'-fluoro nucleoside
  modified_base 11: mod_base = OTHER; note = 2'-O-methoxy nucleoside
  modified_base 12: mod_base = OTHER; note = 2'-O-methoxy nucleoside
  modified_base 13: mod_base = OTHER; note = 2'-O-methoxy nucleoside
  modified_base 14: mod_base = OTHER; note = 2'-O-methoxy nucleoside
  modified_base 15: mod_base = OTHER; note = 2'-O-methoxy nucleoside
  modified_base 16: mod_base = OTHER; note = 2'-O-methoxy nucleoside
  modified_base 17: mod_base = OTHER; note = 2'-O-methoxy nucleoside
  modified_base 18: mod_base = OTHER; note = 2'-O-methoxy nucleoside
  modified_base 19: mod_base = OTHER; note = 2'-O-methoxy nucleoside
  modified_base 20: mod_base = OTHER; note = 2'-O-methoxy nucleoside
  modified_base 21: mod_base = OTHER; note = 2'-O-methoxy nucleoside
gttttgtagcatttttattaa

SEQ ID NO: 361 - RNA, 21 nt, synthetic construct
  source 1..21: mol_type = other RNA
  modified_base 1: mod_base = OTHER; note = 2'-O-methoxy nucleoside with phosphorothioate bond
  modified_base 2: mod_base = OTHER; note = 2'-O-methoxy nucleoside with phosphorothioate bond
  modified_base 3: mod_base = OTHER; note = 2'-O-methoxy nucleoside
  modified_base 4: mod_base = OTHER; note = 2'-O-methoxy nucleoside
  modified_base 5: mod_base = OTHER; note = 2'-O-methoxy nucleoside
  modified_base 6: mod_base = OTHER; note = 2'-O-methoxy nucleoside
  modified_base 7: mod_base = OTHER; note = 2'-fluoro nucleoside
  modified_base 8: mod_base = OTHER; note = 2'-O-methoxy nucleoside
  modified_base 9: mod_base = OTHER; note = 2'-fluoro nucleoside
  modified_base 10: mod_base = OTHER; note = 2'-fluoro nucleoside
  modified_base 11: mod_base = OTHER; note = 2'-fluoro nucleoside
  modified_base 12: mod_base = OTHER; note = 2'-O-methoxy nucleoside
  modified_base 13: mod_base = OTHER; note = 2'-O-methoxy nucleoside
  modified_base 14: mod_base = OTHER; note = 2'-O-methoxy nucleoside
  modified_base 15: mod_base = OTHER; note = 2'-O-methoxy nucleoside
  modified_base 16: mod_base = OTHER; note = 2'-fluoro nucleoside
  modified_base 17: mod_base = OTHER; note = 2'-fluoro nucleoside
  modified_base 18: mod_base = OTHER; note = 2'-O-methoxy nucleoside
  modified_base 19: mod_base = OTHER; note = 2'-O-methoxy nucleoside
  modified_base 20: mod_base = OTHER; note = 2'-O-methoxy nucleoside
  modified_base 21: mod_base = OTHER; note = 2'-O-methoxy nucleoside
gttttgtagcatttttattaa

SEQ ID NO: 362 - RNA, 21 nt, synthetic construct
  source 1..21: mol_type = other RNA
  modified_base 1: mod_base = OTHER; note = 2'-O-methoxy nucleoside with phosphorothioate bond
  modified_base 2: mod_base = OTHER; note = 2'-O-methoxy nucleoside with phosphorothioate bond
  modified_base 3: mod_base = OTHER; note = 2'-O-methoxy nucleoside
  modified_base 4: mod_base = OTHER; note = 2'-O-methoxy nucleoside
  modified_base 5: mod_base = OTHER; note = 2'-O-methoxy nucleoside
  modified_base 6: mod_base = OTHER; note = 2'-O-methoxy nucleoside
  modified_base 7: mod_base = OTHER; note = 2'-fluoro nucleoside
  modified_base 8: mod_base = OTHER; note = 2'-O-methoxy nucleoside
  modified_base 9: mod_base = OTHER; note = 2'-fluoro nucleoside
  modified_base 10: mod_base = OTHER; note = 2'-fluoro nucleoside
  modified_base 11: mod_base = OTHER; note = 2'-fluoro nucleoside
  modified_base 12: mod_base = OTHER; note = 2'-O-methoxy nucleoside
  modified_base 13: mod_base = OTHER; note = 2'-O-methoxy nucleoside
  modified_base 14: mod_base = OTHER; note = 2'-O-methoxy nucleoside
  modified_base 15: mod_base = OTHER; note = 2'-O-methoxy nucleoside
  modified_base 16: mod_base = OTHER; note = 2'-O-methoxy nucleoside
  modified_base 17: mod_base = OTHER; note = 2'-fluoro nucleoside
  modified_base 18: mod_base = OTHER; note = 2'-O-methoxy nucleoside
  modified_base 19: mod_base = OTHER; note = 2'-O-methoxy nucleoside
  modified_base 20: mod_base = OTHER; note = 2'-O-methoxy nucleoside
  modified_base 21: mod_base = OTHER; note = 2'-O-methoxy nucleoside
caccaagatcctgcatgtctt

SEQ ID NO: 363 - RNA, 21 nt, synthetic construct
  source 1..21: mol_type = other RNA
  modified_base 1: mod_base = OTHER; note = 2'-O-methoxy nucleoside with phosphorothioate bond
  modified_base 2: mod_base = OTHER; note = 2'-O-methoxy nucleoside with phosphorothioate bond
  modified_base 3: mod_base = OTHER; note = 2'-O-methoxy nucleoside
  modified_base 4: mod_base = OTHER; note = 2'-O-methoxy nucleoside
  modified_base 5: mod_base = OTHER; note = 2'-O-methoxy nucleoside
  modified_base 6: mod_base = OTHER; note = 2'-O-methoxy nucleoside
  modified_base 7: mod_base = OTHER; note = 2'-fluoro nucleoside
  modified_base 8: mod_base = OTHER; note = 2'-O-methoxy nucleoside
  modified_base 9: mod_base = OTHER; note = 2'-fluoro nucleoside
  modified_base 10: mod_base = OTHER; note = 2'-O-methoxy nucleoside
  modified_base 11: mod_base = OTHER; note = 2'-fluoro nucleoside
  modified_base 12: mod_base = OTHER; note = 2'-O-methoxy nucleoside
  modified_base 13: mod_base = OTHER; note = 2'-O-methoxy nucleoside
  modified_base 14: mod_base = OTHER; note = 2'-O-methoxy nucleoside
  modified_base 15: mod_base = OTHER; note = 2'-O-methoxy nucleoside
  modified_base 16: mod_base = OTHER; note = 2'-O-methoxy nucleoside
  modified_base 17: mod_base = OTHER; note = 2'-fluoro nucleoside
  modified_base 18: mod_base = OTHER; note = 2'-O-methoxy nucleoside
  modified_base 19: mod_base = OTHER; note = 2'-O-methoxy nucleoside
  modified_base 20: mod_base = OTHER; note = 2'-O-methoxy nucleoside
  modified_base 21: mod_base = OTHER; note = 2'-O-methoxy nucleoside
caccaagatcctgcatgtctt

SEQ ID NO: 364 - RNA, 21 nt, synthetic construct
  source 1..21: mol_type = other RNA
  modified_base 1: mod_base = OTHER; note = 2'-O-methoxy nucleoside with phosphorothioate bond
  modified_base 2: mod_base = OTHER; note = 2'-O-methoxy nucleoside with phosphorothioate bond
  modified_base 3: mod_base = OTHER; note = 2'-O-methoxy nucleoside
  modified_base 4: mod_base = OTHER; note = 2'-O-methoxy nucleoside
  modified_base 5: mod_base = OTHER; note = 2'-O-methoxy nucleoside
  modified_base 6: mod_base = OTHER; note = 2'-O-methoxy nucleoside
  modified_base 7: mod_base = OTHER; note = 2'-fluoro nucleoside
  modified_base 8: mod_base = OTHER; note = 2'-O-methoxy nucleoside
  modified_base 9: mod_base = OTHER; note = 2'-fluoro nucleoside
  modified_base 10: mod_base = OTHER; note = 2'-fluoro nucleoside
  modified_base 11: mod_base = OTHER; note = 2'-fluoro nucleoside
  modified_base 12: mod_base = OTHER; note = 2'-O-methoxy nucleoside
  modified_base 13: mod_base = OTHER; note = 2'-O-methoxy nucleoside
  modified_base 14: mod_base = OTHER; note = 2'-O-methoxy nucleoside
  modified_base 15: mod_base = OTHER; note = 2'-O-methoxy nucleoside
  modified_base 16: mod_base = OTHER; note = 2'-O-methoxy nucleoside
  modified_base 17: mod_base = OTHER; note = 2'-fluoro nucleoside
  modified_base 18: mod_base = OTHER; note = 2'-O-methoxy nucleoside
  modified_base 19: mod_base = OTHER; note = 2'-O-methoxy nucleoside
  modified_base 20: mod_base = OTHER; note = 2'-O-methoxy nucleoside
  modified_base 21: mod_base = OTHER; note = 2'-O-methoxy nucleoside
ctcataggcctggagtttatt

SEQ ID NO: 365 - RNA, 21 nt, synthetic construct
  source 1..21: mol_type = other RNA
  modified_base 1: mod_base = OTHER; note = 2'-O-methoxy nucleoside with phosphorothioate bond
  modified_base 2: mod_base = OTHER; note = 2'-O-methoxy nucleoside with phosphorothioate bond
  modified_base 3: mod_base = OTHER; note = 2'-O-methoxy nucleoside
  modified_base 4: mod_base = OTHER; note = 2'-O-methoxy nucleoside
  modified_base 5: mod_base = OTHER; note = 2'-O-methoxy nucleoside
  modified_base 6: mod_base = OTHER; note = 2'-O-methoxy nucleoside
  modified_base 7: mod_base = OTHER; note = 2'-fluoro nucleoside
  modified_base 8: mod_base = OTHER; note = 2'-O-methoxy nucleoside
  modified_base 9: mod_base = OTHER; note = 2'-fluoro nucleoside
  modified_base 10: mod_base = OTHER; note = 2'-O-methoxy nucleoside
  modified_base 11: mod_base = OTHER; note = 2'-fluoro nucleoside
  modified_base 12: mod_base = OTHER; note = 2'-O-methoxy nucleoside
  modified_base 13: mod_base = OTHER; note = 2'-O-methoxy nucleoside
  modified_base 14: mod_base = OTHER; note = 2'-O-methoxy nucleoside
  modified_base 15: mod_base = OTHER; note = 2'-O-methoxy nucleoside
  modified_base 16: mod_base = OTHER; note = 2'-O-methoxy nucleoside
  modified_base 17: mod_base = OTHER; note = 2'-fluoro nucleoside
  modified_base 18: mod_base = OTHER; note = 2'-O-methoxy nucleoside
  modified_base 19: mod_base = OTHER; note = 2'-O-methoxy nucleoside
  modified_base 20: mod_base = OTHER; note = 2'-O-methoxy nucleoside
  modified_base 21: mod_base = OTHER; note = 2'-O-methoxy nucleoside
ctcataggcctggagtttatt

SEQ ID NO: 366 - RNA, 21 nt, synthetic construct
  source 1..21: mol_type = other RNA
  modified_base 1: mod_base = OTHER; note = 2'-O-methoxy nucleoside with phosphorothioate bond
  modified_base 2: mod_base = OTHER; note = 2'-O-methoxy nucleoside with phosphorothioate bond
  modified_base 3: mod_base = OTHER; note = 2'-O-methoxy nucleoside
  modified_base 4: mod_base = OTHER; note = 2'-O-methoxy nucleoside
  modified_base 5: mod_base = OTHER; note = 2'-O-methoxy nucleoside
  modified_base 6: mod_base = OTHER; note = 2'-O-methoxy nucleoside
  modified_base 7: mod_base = OTHER; note = 2'-fluoro nucleoside
  modified_base 8: mod_base = OTHER; note = 2'-O-methoxy nucleoside
  modified_base 9: mod_base = OTHER; note = 2'-fluoro nucleoside
  modified_base 10: mod_base = OTHER; note = 2'-fluoro nucleoside
  modified_base 11: mod_base = OTHER; note = 2'-fluoro nucleoside
  modified_base 12: mod_base = OTHER; note = 2'-O-methoxy nucleoside
  modified_base 13: mod_base = OTHER; note = 2'-O-methoxy nucleoside
  modified_base 14: mod_base = OTHER; note = 2'-O-methoxy nucleoside
  modified_base 15: mod_base = OTHER; note = 2'-O-methoxy nucleoside
  modified_base 16: mod_base = OTHER; note = 2'-O-methoxy nucleoside
  modified_base 17: mod_base = OTHER; note = 2'-fluoro nucleoside
  modified_base 18: mod_base = OTHER; note = 2'-O-methoxy nucleoside
  modified_base 19: mod_base = OTHER; note = 2'-O-methoxy nucleoside
  modified_base 20: mod_base = OTHER; note = 2'-O-methoxy nucleoside
  modified_base 21: mod_base = OTHER; note = 2'-O-methoxy nucleoside
ggcctggagtttattcggaaa

SEQ ID NO: 367 - RNA, 21 nt, synthetic construct
  source 1..21: mol_type = other RNA
  modified_base 1: mod_base = OTHER; note = 2'-O-methoxy nucleoside with phosphorothioate bond
  modified_base 2: mod_base = OTHER; note = 2'-O-methoxy nucleoside with phosphorothioate bond
  modified_base 3: mod_base = OTHER; note = 2'-O-methoxy nucleoside
  modified_base 4: mod_base = OTHER; note = 2'-O-methoxy nucleoside
  modified_base 5: mod_base = OTHER; note = 2'-O-methoxy nucleoside
  modified_base 6: mod_base = OTHER; note = 2'-O-methoxy nucleoside
  modified_base 7: mod_base = OTHER; note = 2'-fluoro nucleoside
  modified_base 8: mod_base = OTHER; note = 2'-O-methoxy nucleoside
  modified_base 9: mod_base = OTHER; note = 2'-fluoro nucleoside
  modified_base 10: mod_base = OTHER; note = 2'-O-methoxy nucleoside
  modified_base 11: mod_base = OTHER; note = 2'-fluoro nucleoside
  modified_base 12: mod_base = OTHER; note = 2'-O-methoxy nucleoside
  modified_base 13: mod_base = OTHER; note = 2'-O-methoxy nucleoside
  modified_base 14: mod_base = OTHER; note = 2'-O-methoxy nucleoside
  modified_base 15: mod_base = OTHER; note = 2'-O-methoxy nucleoside
  modified_base 16: mod_base = OTHER; note = 2'-O-methoxy nucleoside
  modified_base 17: mod_base = OTHER; note = 2'-fluoro nucleoside
  modified_base 18: mod_base = OTHER; note = 2'-O-methoxy nucleoside
  modified_base 19: mod_base = OTHER; note = 2'-O-methoxy nucleoside
  modified_base 20: mod_base = OTHER; note = 2'-O-methoxy nucleoside
  modified_base 21: mod_base = OTHER; note = 2'-O-methoxy nucleoside
ggcctggagtttattcggaaa

SEQ ID NO: 368 - RNA, 21 nt, synthetic construct
  source 1..21: mol_type = other RNA
  modified_base 1: mod_base = OTHER; note = 2'-O-methoxy nucleoside with phosphorothioate bond
  modified_base 2: mod_base = OTHER; note = 2'-O-methoxy nucleoside with phosphorothioate bond
  modified_base 3: mod_base = OTHER; note = 2'-O-methoxy nucleoside
  modified_base 4: mod_base = OTHER; note = 2'-O-methoxy nucleoside
  modified_base 5: mod_base = OTHER; note = 2'-O-methoxy nucleoside
  modified_base 6: mod_base = OTHER; note = 2'-O-methoxy nucleoside
  modified_base 7: mod_base = OTHER; note = 2'-fluoro nucleoside
  modified_base 8: mod_base = OTHER; note = 2'-O-methoxy nucleoside
  modified_base 9: mod_base = OTHER; note = 2'-fluoro nucleoside
  modified_base 10: mod_base = OTHER; note = 2'-fluoro nucleoside
  modified_base 11: mod_base = OTHER; note = 2'-fluoro nucleoside
  modified_base 12: mod_base = OTHER; note = 2'-O-methoxy nucleoside
  modified_base 13: mod_base = OTHER; note = 2'-O-methoxy nucleoside
  modified_base 14: mod_base = OTHER; note = 2'-O-methoxy nucleoside
  modified_base 15: mod_base = OTHER; note = 2'-O-methoxy nucleoside
  modified_base 16: mod_base = OTHER; note = 2'-O-methoxy nucleoside
  modified_base 17: mod_base = OTHER; note = 2'-fluoro nucleoside
  modified_base 18: mod_base = OTHER; note = 2'-O-methoxy nucleoside
  modified_base 19: mod_base = OTHER; note = 2'-O-methoxy nucleoside
  modified_base 20: mod_base = OTHER; note = 2'-O-methoxy nucleoside
  modified_base 21: mod_base = OTHER; note = 2'-O-methoxy nucleoside
cagcacctgctttgtgtcaca

SEQ ID NO: 369 - RNA, 21 nt, synthetic construct
  source 1..21: mol_type = other RNA
  modified_base 1: mod_base = OTHER; note = 2'-O-methoxy nucleoside with phosphorothioate bond
  modified_base 2: mod_base = OTHER; note = 2'-O-methoxy nucleoside with phosphorothioate bond
  modified_base 3: mod_base = OTHER; note = 2'-O-methoxy nucleoside
  modified_base 4: mod_base = OTHER; note = 2'-O-methoxy nucleoside
  modified_base 5: mod_base = OTHER; note = 2'-O-methoxy nucleoside
  modified_base 6: mod_base = OTHER; note = 2'-O-methoxy nucleoside
  modified_base 7: mod_base = OTHER; note = 2'-fluoro nucleoside
  modified_base 8: mod_base = OTHER; note = 2'-O-methoxy nucleoside
  modified_base 9: mod_base = OTHER; note = 2'-fluoro nucleoside
  modified_base 10: mod_base = OTHER; note = 2'-O-methoxy nucleoside
  modified_base 11: mod_base = OTHER; note = 2'-fluoro nucleoside
  modified_base 12: mod_base = OTHER; note = 2'-O-methoxy nucleoside
  modified_base 13: mod_base = OTHER; note = 2'-O-methoxy nucleoside
  modified_base 14: mod_base = OTHER; note = 2'-O-methoxy nucleoside
  modified_base 15: mod_base = OTHER; note = 2'-O-methoxy nucleoside
  modified_base 16: mod_base = OTHER; note = 2'-O-methoxy nucleoside
  modified_base 17: mod_base = OTHER; note = 2'-fluoro nucleoside
  modified_base 18: mod_base = OTHER; note = 2'-O-methoxy nucleoside
  modified_base 19: mod_base = OTHER; note = 2'-O-methoxy nucleoside
  modified_base 20: mod_base = OTHER; note = 2'-O-methoxy nucleoside
  modified_base 21: mod_base = OTHER; note = 2'-O-methoxy nucleoside
cagcacctgctttgtgtcaca

SEQ ID NO: 370 - RNA, 21 nt, synthetic construct
  source 1..21: mol_type = other RNA
  modified_base 1: mod_base = OTHER; note = 2'-O-methoxy nucleoside with phosphorothioate bond
  modified_base 2: mod_base = OTHER; note = 2'-O-methoxy nucleoside with phosphorothioate bond
  modified_base 3: mod_base = OTHER; note = 2'-O-methoxy nucleoside
  modified_base 4: mod_base = OTHER; note = 2'-O-methoxy nucleoside
  modified_base 5: mod_base = OTHER; note = 2'-O-methoxy nucleoside
  modified_base 6: mod_base = OTHER; note = 2'-O-methoxy nucleoside
  modified_base 7: mod_base = OTHER; note = 2'-fluoro nucleoside
  modified_base 8: mod_base = OTHER; note = 2'-O-methoxy nucleoside
  modified_base 9: mod_base = OTHER; note = 2'-fluoro nucleoside
  modified_base 10: mod_base = OTHER; note = 2'-fluoro nucleoside
  modified_base 11: mod_base = OTHER; note = 2'-fluoro nucleoside
  modified_base 12: mod_base = OTHER; note = 2'-O-methoxy nucleoside
  modified_base 13: mod_base = OTHER; note = 2'-O-methoxy nucleoside
  modified_base 14: mod_base = OTHER; note = 2'-O-methoxy nucleoside
  modified_base 15: mod_base = OTHER; note = 2'-O-methoxy nucleoside
  modified_base 16: mod_base = OTHER; note = 2'-O-methoxy nucleoside
  modified_base 17: mod_base = OTHER; note = 2'-fluoro nucleoside
  modified_base 18: mod_base = OTHER; note = 2'-O-methoxy nucleoside
  modified_base 19: mod_base = OTHER; note = 2'-O-methoxy nucleoside
  modified_base 20: mod_base = OTHER; note = 2'-O-methoxy nucleoside
  modified_base 21: mod_base = OTHER; note = 2'-O-methoxy nucleoside
ggtctggaatgcaaagtcaag

SEQ ID NO: 371 - RNA, 21 nt, synthetic construct
  source 1..21: mol_type = other RNA
  modified_base 1: mod_base = OTHER; note = 2'-O-methoxy nucleoside with phosphorothioate bond
  modified_base 2: mod_base = OTHER; note = 2'-O-methoxy nucleoside with phosphorothioate bond
  modified_base 3: mod_base = OTHER; note = 2'-O-methoxy nucleoside
  modified_base 4: mod_base = OTHER; note = 2'-O-methoxy nucleoside
  modified_base 5: mod_base = OTHER; note = 2'-O-methoxy nucleoside
  modified_base 6: mod_base = OTHER; note = 2'-O-methoxy nucleoside
  modified_base 7: mod_base = OTHER; note = 2'-fluoro nucleoside
  modified_base 8: mod_base = OTHER; note = 2'-O-methoxy nucleoside
  modified_base 9: mod_base = OTHER; note = 2'-fluoro nucleoside
  modified_base 10: mod_base = OTHER; note = 2'-O-methoxy nucleoside
  modified_base 11: mod_base = OTHER; note = 2'-fluoro nucleoside
  modified_base 12: mod_base = OTHER; note = 2'-O-methoxy nucleoside
  modified_base 13: mod_base = OTHER; note = 2'-O-methoxy nucleoside
  modified_base 14: mod_base = OTHER; note = 2'-O-methoxy nucleoside
  modified_base 15: mod_base = OTHER; note = 2'-O-methoxy nucleoside
  modified_base 16: mod_base = OTHER; note = 2'-O-methoxy nucleoside
  modified_base 17: mod_base = OTHER; note = 2'-fluoro nucleoside
  modified_base 18: mod_base = OTHER; note = 2'-O-methoxy nucleoside
  modified_base 19: mod_base = OTHER; note = 2'-O-methoxy nucleoside
  modified_base 20: mod_base = OTHER; note = 2'-O-methoxy nucleoside
  modified_base 21: mod_base = OTHER; note = 2'-O-methoxy nucleoside
ggtctggaatgcaaagtcaag

SEQ ID NO: 372 - RNA, 21 nt, synthetic construct
  source 1..21: mol_type = other RNA
  modified_base 1: mod_base = OTHER; note = 2'-O-methoxy nucleoside with phosphorothioate bond
  modified_base 2: mod_base = OTHER; note = 2'-O-methoxy nucleoside with phosphorothioate bond
  modified_base 3: mod_base = OTHER; note = 2'-O-methoxy nucleoside
  modified_base 4: mod_base = OTHER; note = 2'-O-methoxy nucleoside
  modified_base 5: mod_base = OTHER; note = 2'-O-methoxy nucleoside
  modified_base 6: mod_base = OTHER; note = 2'-O-methoxy nucleoside
  modified_base 7: mod_base = OTHER; note = 2'-fluoro nucleoside
  modified_base 8: mod_base = OTHER; note = 2'-O-methoxy nucleoside
  modified_base 9: mod_base = OTHER; note = 2'-fluoro nucleoside
  modified_base 10: mod_base = OTHER; note = 2'-fluoro nucleoside
  modified_base 11: mod_base = OTHER; note = 2'-fluoro nucleoside
  modified_base 12: mod_base = OTHER; note = 2'-O-methoxy nucleoside
  modified_base 13: mod_base = OTHER; note = 2'-O-methoxy nucleoside
  modified_base 14: mod_base = OTHER; note = 2'-O-methoxy nucleoside
  modified_base 15: mod_base = OTHER; note = 2'-O-methoxy nucleoside
  modified_base 16: mod_base = OTHER; note = 2'-O-methoxy nucleoside
  modified_base 17: mod_base = OTHER; note = 2'-fluoro nucleoside
  modified_base 18: mod_base = OTHER; note = 2'-O-methoxy nucleoside
  modified_base 19: mod_base = OTHER; note = 2'-O-methoxy nucleoside
  modified_base 20: mod_base = OTHER; note = 2'-O-methoxy nucleoside
  modified_base 21: mod_base = OTHER; note = 2'-O-methoxy nucleoside
gcggagatgcttctaaggcat

SEQ ID NO: 373 - RNA, 21 nt, synthetic construct
  source 1..21: mol_type = other RNA
  modified_base 1: mod_base = OTHER; note = 2'-O-methoxy nucleoside with phosphorothioate bond
  modified_base 2: mod_base = OTHER; note = 2'-O-methoxy nucleoside with phosphorothioate bond
  modified_base 3: mod_base = OTHER; note = 2'-O-methoxy nucleoside
  modified_base 4: mod_base = OTHER; note = 2'-O-methoxy nucleoside
  modified_base 5: mod_base = OTHER; note = 2'-O-methoxy nucleoside
  modified_base 6: mod_base = OTHER; note = 2'-O-methoxy nucleoside
  modified_base 7: mod_base = OTHER; note = 2'-fluoro nucleoside
  modified_base 8: mod_base = OTHER; note = 2'-O-methoxy nucleoside
  modified_base 9: mod_base = OTHER; note = 2'-fluoro nucleoside
  modified_base 10: mod_base = OTHER; note = 2'-O-methoxy nucleoside
  modified_base 11: mod_base = OTHER; note = 2'-fluoro nucleoside
  modified_base 12: mod_base = OTHER; note = 2'-O-methoxy nucleoside
  modified_base 13: mod_base = OTHER; note = 2'-O-methoxy nucleoside
  modified_base 14: mod_base = OTHER; note = 2'-O-methoxy nucleoside
  modified_base 15: mod_base = OTHER; note = 2'-O-methoxy nucleoside
  modified_base 16: mod_base = OTHER; note = 2'-O-methoxy nucleoside
  modified_base 17: mod_base = OTHER; note = 2'-fluoro nucleoside
  modified_base 18: mod_base = OTHER; note = 2'-O-methoxy nucleoside
  modified_base 19: mod_base = OTHER; note = 2'-O-methoxy nucleoside
  modified_base 20: mod_base = OTHER; note = 2'-O-methoxy nucleoside
  modified_base 21: mod_base = OTHER; note = 2'-O-methoxy nucleoside
gcggagatgcttctaaggcat

SEQ ID NO: 374 - RNA, 21 nt, synthetic construct
  source 1..21: mol_type = other RNA
  modified_base 1: mod_base = OTHER; note = 2'-O-methoxy nucleoside with phosphorothioate bond
  modified_base 2: mod_base = OTHER; note = 2'-O-methoxy nucleoside with phosphorothioate bond
  modified_base 3: mod_base = OTHER; note = 2'-O-methoxy nucleoside
  modified_base 4: mod_base = OTHER; note = 2'-O-methoxy nucleoside
  modified_base 5: mod_base = OTHER; note = 2'-O-methoxy nucleoside
  modified_base 6: mod_base = OTHER; note = 2'-O-methoxy nucleoside
  modified_base 7: mod_base = OTHER; note = 2'-fluoro nucleoside
  modified_base 8: mod_base = OTHER; note = 2'-O-methoxy nucleoside
  modified_base 9: mod_base = OTHER; note = 2'-fluoro nucleoside
  modified_base 10: mod_base = OTHER; note = 2'-fluoro nucleoside
  modified_base 11: mod_base = OTHER; note = 2'-fluoro nucleoside
  modified_base 12: mod_base = OTHER; note = 2'-O-methoxy nucleoside
  modified_base 13: mod_base = OTHER; note = 2'-O-methoxy nucleoside
  modified_base 14: mod_base = OTHER; note = 2'-O-methoxy nucleoside
  modified_base 15: mod_base = OTHER; note = 2'-O-methoxy nucleoside
  modified_base 16: mod_base = OTHER; note = 2'-O-methoxy nucleoside
  modified_base 17: mod_base = OTHER; note = 2'-fluoro nucleoside
  modified_base 18: mod_base = OTHER; note = 2'-O-methoxy nucleoside
  modified_base 19: mod_base = OTHER; note = 2'-O-methoxy nucleoside
  modified_base 20: mod_base = OTHER; note = 2'-O-methoxy nucleoside
  modified_base 21: mod_base = OTHER; note = 2'-O-methoxy nucleoside
gggttttgtagcatttttatt

SEQ ID NO: 375 - RNA, 21 nt, synthetic construct
  source 1..21: mol_type = other RNA
  modified_base 1: mod_base = OTHER; note = 2'-O-methoxy nucleoside with phosphorothioate bond
  modified_base 2: mod_base = OTHER; note = 2'-O-methoxy nucleoside with phosphorothioate bond
  modified_base 3: mod_base = OTHER; note = 2'-O-methoxy nucleoside
  modified_base 4: mod_base = OTHER; note = 2'-O-methoxy nucleoside
  modified_base 5: mod_base = OTHER; note = 2'-O-methoxy nucleoside
  modified_base 6: mod_base = OTHER; note = 2'-O-methoxy nucleoside
  modified_base 7: mod_base = OTHER; note = 2'-fluoro nucleoside
  modified_base 8: mod_base = OTHER; note = 2'-O-methoxy nucleoside
  modified_base 9: mod_base = OTHER; note = 2'-fluoro nucleoside
  modified_base 10: mod_base = OTHER; note = 2'-O-methoxy nucleoside
  modified_base 11: mod_base = OTHER; note = 2'-fluoro nucleoside
  modified_base 12: mod_base = OTHER; note = 2'-O-methoxy nucleoside
  modified_base 13: mod_base = OTHER; note = 2'-O-methoxy nucleoside
  modified_base 14: mod_base = OTHER; note = 2'-O-methoxy nucleoside
  modified_base 15: mod_base = OTHER; note = 2'-O-methoxy nucleoside
  modified_base 16: mod_base = OTHER; note = 2'-O-methoxy nucleoside
  modified_base 17: mod_base = OTHER; note = 2'-fluoro nucleoside
  modified_base 18: mod_base = OTHER; note = 2'-O-methoxy nucleoside
  modified_base 19: mod_base = OTHER; note = 2'-O-methoxy nucleoside
  modified_base 20: mod_base = OTHER; note = 2'-O-methoxy nucleoside
  modified_base 21: mod_base = OTHER; note = 2'-O-methoxy nucleoside
gggttttgtagcatttttatt

SEQ ID NO: 376 - RNA, 23 nt, synthetic construct
  source 1..23: mol_type = other RNA
  modified_base 1: mod_base = OTHER; note = 2'-O-methoxy nucleoside with phosphorothioate bond
  modified_base 2: mod_base = OTHER; note = 2'-fluoro nucleoside with phosphorothioate bond
  modified_base 3: mod_base = OTHER; note = 2'-O-methoxy nucleoside
  modified_base 4: mod_base = OTHER; note = 2'-O-methoxy nucleoside
  modified_base 5: mod_base = OTHER; note = 2'-O-methoxy nucleoside
  modified_base 6: mod_base = OTHER; note = 2'-fluoro nucleoside
  modified_base 7: mod_base = OTHER; note = 2'-O-methoxy nucleoside
  modified_base 8: mod_base = OTHER; note = 2'-O-methoxy nucleoside
  modified_base 9: mod_base = OTHER; note = 2'-O-methoxy nucleoside
  modified_base 10: mod_base = OTHER; note = 2'-O-methoxy nucleoside
  modified_base 11: mod_base = OTHER; note = 2'-O-methoxy nucleoside
  modified_base 12: mod_base = OTHER; note = 2'-O-methoxy nucleoside
  modified_base 13: mod_base = OTHER; note = 2'-O-methoxy nucleoside
  modified_base 14: mod_base = OTHER; note = 2'-fluoro nucleoside
  modified_base 15: mod_base = OTHER; note = 2'-O-methoxy nucleoside
  modified_base 16: mod_base = OTHER; note = 2'-fluoro nucleoside
  modified_base 17: mod_base = OTHER; note = 2'-O-methoxy nucleoside
  modified_base 18: mod_base = OTHER; note = 2'-O-methoxy nucleoside
  modified_base 19: mod_base = OTHER; note = 2'-O-methoxy nucleoside
  modified_base 20: mod_base = OTHER; note = 2'-O-methoxy nucleoside
  modified_base 21: mod_base = OTHER; note = 2'-O-methoxy nucleoside with phosphorothioate bond
  modified_base 22: mod_base = OTHER; note = 2'-O-methoxy nucleoside with phosphorothioate bond
  modified_base 23: mod_base = OTHER; note = 2'-O-methoxy nucleoside
atggaagacatgcaggatcttgg

SEQ ID NO: 377 - RNA, 23 nt, synthetic construct
  source 1..23: mol_type = other RNA
  modified_base 1: mod_base = OTHER; note = 2'-O-methoxy nucleoside with phosphorothioate bond
  modified_base 2: mod_base = OTHER; note = 2'-fluoro nucleoside with phosphorothioate bond
  modified_base 3: mod_base = OTHER; note = 2'-fluoro nucleoside
  modified_base 4: mod_base = OTHER; note = 2'-fluoro nucleoside
  modified_base 5: mod_base = OTHER; note = 2'-O-methoxy nucleoside
  modified_base 6: mod_base = OTHER; note = 2'-fluoro nucleoside
  modified_base 7: mod_base = OTHER; note = 2'-O-methoxy nucleoside
  modified_base 8: mod_base = OTHER; note = 2'-O-methoxy nucleoside
  modified_base 9: mod_base = OTHER; note = 2'-O-methoxy nucleoside
  modified_base 10: mod_base = OTHER; note = 2'-O-methoxy nucleoside
  modified_base 11: mod_base = OTHER; note = 2'-O-methoxy nucleoside
  modified_base 12: mod_base = OTHER; note = 2'-O-methoxy nucleoside
  modified_base 13: mod_base = OTHER; note = 2'-O-methoxy nucleoside
  modified_base 14: mod_base = OTHER; note = 2'-fluoro nucleoside
  modified_base 15: mod_base = OTHER; note = 2'-O-methoxy nucleoside
  modified_base 16: mod_base = OTHER; note = 2'-fluoro nucleoside
  modified_base 17: mod_base = OTHER; note = 2'-O-methoxy nucleoside
  modified_base 18: mod_base = OTHER; note = 2'-O-methoxy nucleoside
  modified_base 19: mod_base = OTHER; note = 2'-O-methoxy nucleoside
  modified_base 20: mod_base = OTHER; note = 2'-O-methoxy nucleoside
  modified_base 21: mod_base = OTHER; note = 2'-O-methoxy nucleoside with phosphorothioate bond
  modified_base 22: mod_base = OTHER; note = 2'-O-methoxy nucleoside with phosphorothioate bond
  modified_base 23: mod_base = OTHER; note = 2'-O-methoxy nucleoside
atggaagacatgcaggatcttgg

SEQ ID NO: 378 - RNA, 23 nt, synthetic construct
  source 1..23: mol_type = other RNA
  modified_base 1: mod_base = OTHER; note = 2'-O-methoxy nucleoside with phosphorothioate bond
  modified_base 2: mod_base = OTHER; note = 2'-fluoro nucleoside with phosphorothioate bond
  modified_base 3: mod_base = OTHER; note = 2'-O-methoxy nucleoside
  modified_base 4: mod_base = OTHER; note = 2'-fluoro nucleoside
  modified_base 5: mod_base = OTHER; note = 2'-fluoro nucleoside
  modified_base 6: mod_base = OTHER; note = 2'-fluoro nucleoside
  modified_base 7: mod_base = OTHER; note = 2'-O-methoxy nucleoside
  modified_base 8: mod_base = OTHER; note = 2'-O-methoxy nucleoside
  modified_base 9: mod_base = OTHER; note = 2'-O-methoxy nucleoside
  modified_base 10: mod_base = OTHER; note = 2'-O-methoxy nucleoside
  modified_base 11: mod_base = OTHER; note = 2'-O-methoxy nucleoside
  modified_base 12: mod_base = OTHER; note = 2'-O-methoxy nucleoside
  modified_base 13: mod_base = OTHER; note = 2'-O-methoxy nucleoside
  modified_base 14: mod_base = OTHER; note = 2'-fluoro nucleoside
  modified_base 15: mod_base = OTHER; note = 2'-O-methoxy nucleoside
  modified_base 16: mod_base = OTHER; note = 2'-fluoro nucleoside
  modified_base 17: mod_base = OTHER; note = 2'-O-methoxy nucleoside
  modified_base 18: mod_base = OTHER; note = 2'-O-methoxy nucleoside
  modified_base 19: mod_base = OTHER; note = 2'-O-methoxy nucleoside
  modified_base 20: mod_base = OTHER; note = 2'-O-methoxy nucleoside
  modified_base 21: mod_base = OTHER; note = 2'-O-methoxy nucleoside with phosphorothioate bond
  modified_base 22: mod_base = OTHER; note = 2'-O-methoxy nucleoside with phosphorothioate bond
  modified_base 23: mod_base = OTHER; note = 2'-O-methoxy nucleoside
atggaagacatgcaggatcttgg

SEQ ID NO: 379 - RNA, 23 nt, synthetic construct
  source 1..23: mol_type = other RNA
  modified_base 1: mod_base = OTHER; note = 2'-O-methoxy nucleoside with phosphorothioate bond
  modified_base 2: mod_base = OTHER; note = 2'-fluoro nucleoside with phosphorothioate bond
  modified_base 3: mod_base = OTHER; note = 2'-O-methoxy nucleoside
  modified_base 4: mod_base = OTHER; note = 2'-O-methoxy nucleoside
  modified_base 5: mod_base = OTHER; note = 2'-O-methoxy nucleoside
  modified_base 6: mod_base = OTHER; note = 2'-fluoro nucleoside
  modified_base 7: mod_base = OTHER; note = 2'-O-methoxy nucleoside
  modified_base 8: mod_base = OTHER; note = 2'-O-methoxy nucleoside
  modified_base 9: mod_base = OTHER; note = 2'-O-methoxy nucleoside
  modified_base 10: mod_base = OTHER; note = 2'-O-methoxy nucleoside
  modified_base 11: mod_base = OTHER; note = 2'-O-methoxy nucleoside
  modified_base 12: mod_base = OTHER; note = 2'-O-methoxy nucleoside
  modified_base 13: mod_base = OTHER; note = 2'-O-methoxy nucleoside
  modified_base 14: mod_base = OTHER; note = 2'-fluoro nucleoside
  modified_base 15: mod_base = OTHER; note = 2'-O-methoxy nucleoside
  modified_base 16: mod_base = OTHER; note = 2'-O-methoxy nucleoside
  modified_base 17: mod_base = OTHER; note = 2'-O-methoxy nucleoside
  modified_base 18: mod_base = OTHER; note = 2'-O-methoxy nucleoside
  modified_base 19: mod_base = OTHER; note = 2'-O-methoxy nucleoside
  modified_base 20: mod_base = OTHER; note = 2'-O-methoxy nucleoside
  modified_base 21: mod_base = OTHER; note = 2'-O-methoxy nucleoside with phosphorothioate bond
  modified_base 22: mod_base = OTHER; note = 2'-O-methoxy nucleoside with phosphorothioate bond
  modified_base 23: mod_base = OTHER; note = 2'-O-methoxy nucleoside
atggaagacatgcaggatcttgg

SEQ ID NO: 380 - RNA, 23 nt, synthetic construct
  source 1..23: mol_type = other RNA
  modified_base 1: mod_base = OTHER; note = 2'-O-methoxy nucleoside with phosphorothioate bond
  modified_base 2: mod_base = OTHER; note = 2'-fluoro nucleoside with phosphorothioate bond
  modified_base 3: mod_base = OTHER; note = 2'-O-methoxy nucleoside
  modified_base 4: mod_base = OTHER; note = 2'-O-methoxy nucleoside
  modified_base 5: mod_base = OTHER; note = 2'-O-methoxy nucleoside
  modified_base 6: mod_base = OTHER; note = 2'-fluoro nucleoside
  modified_base 7: mod_base = OTHER; note = 2'-O-methoxy nucleoside
  modified_base 8: mod_base = OTHER; note = 2'-O-methoxy nucleoside
  modified_base 9: mod_base = OTHER; note = 2'-O-methoxy nucleoside
  modified_base 10: mod_base = OTHER; note = 2'-O-methoxy nucleoside
  modified_base 11: mod_base = OTHER; note = 2'-O-methoxy nucleoside
  modified_base 12: mod_base = OTHER; note = 2'-O-methoxy nucleoside
  modified_base 13: mod_base = OTHER; note = 2'-O-methoxy nucleoside
  modified_base 14: mod_base = OTHER; note = 2'-fluoro nucleoside
  modified_base 15: mod_base = OTHER; note = 2'-O-methoxy nucleoside
  modified_base 16: mod_base = OTHER; note = 2'-fluoro nucleoside
  modified_base 17: mod_base = OTHER; note = 2'-O-methoxy nucleoside
  modified_base 18: mod_base = OTHER; note = 2'-O-methoxy nucleoside
  modified_base 19: mod_base = OTHER; note = 2'-O-methoxy nucleoside
  modified_base 20: mod_base = OTHER; note = 2'-O-methoxy nucleoside
  modified_base 21: mod_base = OTHER; note = 2'-O-methoxy nucleoside with phosphorothioate bond
  modified_base 22: mod_base = OTHER; note = 2'-O-methoxy nucleoside with phosphorothioate bond
  modified_base 23: mod_base = OTHER; note = 2'-O-methoxy nucleoside
atccagaaagctaagcctccatt

SEQ ID NO: 381 - RNA, 23 nt, synthetic construct
  source 1..23: mol_type = other RNA
  modified_base 1: mod_base = OTHER; note = 2'-O-methoxy nucleoside with phosphorothioate bond
  modified_base 2: mod_base = OTHER; note = 2'-fluoro nucleoside with phosphorothioate bond
  modified_base 3: mod_base = OTHER; note = 2'-fluoro nucleoside
  modified_base 4: mod_base = OTHER; note = 2'-fluoro nucleoside
  modified_base 5: mod_base = OTHER; note = 2'-O-methoxy nucleoside
  modified_base 6: mod_base = OTHER; note = 2'-fluoro nucleoside
  modified_base 7: mod_base = OTHER; note = 2'-O-methoxy nucleoside
  modified_base 8: mod_base = OTHER; note = 2'-O-methoxy nucleoside
  modified_base 9: mod_base = OTHER; note = 2'-O-methoxy nucleoside
  modified_base 10: mod_base = OTHER; note = 2'-O-methoxy nucleoside
  modified_base 11: mod_base = OTHER; note = 2'-O-methoxy nucleoside
  modified_base 12: mod_base = OTHER; note = 2'-O-methoxy nucleoside
  modified_base 13: mod_base = OTHER; note = 2'-O-methoxy nucleoside
  modified_base 14: mod_base = OTHER; note = 2'-fluoro nucleoside
  modified_base 15: mod_base = OTHER; note = 2'-O-methoxy nucleoside
  modified_base 16: mod_base = OTHER; note = 2'-fluoro nucleoside
  modified_base 17: mod_base = OTHER; note = 2'-O-methoxy nucleoside
  modified_base 18: mod_base = OTHER; note = 2'-O-methoxy nucleoside
  modified_base 19: mod_base = OTHER; note = 2'-O-methoxy nucleoside
  modified_base 20: mod_base = OTHER; note = 2'-O-methoxy nucleoside
  modified_base 21: mod_base = OTHER; note = 2'-O-methoxy nucleoside with phosphorothioate bond
  modified_base 22: mod_base = OTHER; note = 2'-O-methoxy nucleoside with phosphorothioate bond
  modified_base 23: mod_base = OTHER; note = 2'-O-methoxy nucleoside
atccagaaagctaagcctccatt

SEQ ID NO: 382 - RNA, 23 nt, synthetic construct
  source 1..23: mol_type = other RNA
  modified_base 1: mod_base = OTHER; note = 2'-O-methoxy nucleoside with phosphorothioate bond
  modified_base 2: mod_base = OTHER; note = 2'-fluoro nucleoside with phosphorothioate bond
  modified_base 3: mod_base = OTHER; note = 2'-O-methoxy nucleoside
  modified_base 4: mod_base = OTHER; note = 2'-fluoro nucleoside
  modified_base 5: mod_base = OTHER; note = 2'-fluoro nucleoside
  modified_base 6: mod_base = OTHER; note = 2'-fluoro nucleoside
  modified_base 7: mod_base = OTHER; note = 2'-O-methoxy nucleoside
  modified_base 8: mod_base = OTHER; note = 2'-O-methoxy nucleoside
  modified_base 9: mod_base = OTHER; note = 2'-O-methoxy nucleoside
  modified_base 10: mod_base = OTHER; note = 2'-O-methoxy nucleoside
  modified_base 11: mod_base = OTHER; note = 2'-O-methoxy nucleoside
  modified_base 12: mod_base = OTHER; note = 2'-O-methoxy nucleoside
  modified_base 13: mod_base = OTHER; note = 2'-O-methoxy nucleoside
  modified_base 14: mod_base = OTHER; note = 2'-fluoro nucleoside
  modified_base 15: mod_base = OTHER; note = 2'-O-methoxy nucleoside
  modified_base 16: mod_base = OTHER; note = 2'-fluoro nucleoside
  modified_base 17: mod_base = OTHER; note = 2'-O-methoxy nucleoside
  modified_base 18: mod_base = OTHER; note = 2'-O-methoxy nucleoside
  modified_base 19: mod_base = OTHER; note = 2'-O-methoxy nucleoside
  modified_base 20: mod_base = OTHER; note = 2'-O-methoxy nucleoside
  modified_base 21: mod_base = OTHER; note = 2'-O-methoxy nucleoside with phosphorothioate bond
  modified_base 22: mod_base = OTHER; note = 2'-O-methoxy nucleoside with phosphorothioate bond
  modified_base 23: mod_base = OTHER; note = 2'-O-methoxy nucleoside
atccagaaagctaagcctccatt

SEQ ID NO: 383 - RNA, 23 nt, synthetic construct
  source 1..23: mol_type = other RNA
  modified_base 1: mod_base = OTHER; note = 2'-O-methoxy nucleoside with phosphorothioate bond
  modified_base 2: mod_base = OTHER; note = 2'-fluoro nucleoside with phosphorothioate bond
  modified_base 3: mod_base = OTHER; note = 2'-O-methoxy nucleoside
  modified_base 4: mod_base = OTHER; note = 2'-O-methoxy nucleoside
  modified_base 5: mod_base = OTHER; note = 2'-O-methoxy nucleoside
  modified_base 6: mod_base = OTHER; note = 2'-fluoro nucleoside
  modified_base 7: mod_base = OTHER; note = 2'-O-methoxy nucleoside
  modified_base 8: mod_base = OTHER; note = 2'-O-methoxy nucleoside
  modified_base 9: mod_base = OTHER; note = 2'-O-methoxy nucleoside
  modified_base 10: mod_base = OTHER; note = 2'-O-methoxy nucleoside
  modified_base 11: mod_base = OTHER; note = 2'-O-methoxy nucleoside
  modified_base 12: mod_base = OTHER; note = 2'-O-methoxy nucleoside
  modified_base 13: mod_base = OTHER; note = 2'-O-methoxy nucleoside
  modified_base 14: mod_base = OTHER; note = 2'-fluoro nucleoside
  modified_base 15: mod_base = OTHER; note = 2'-O-methoxy nucleoside
  modified_base 16: mod_base = OTHER; note = 2'-O-methoxy nucleoside
  modified_base 17: mod_base = OTHER; note = 2'-O-methoxy nucleoside
  modified_base 18: mod_base = OTHER; note = 2'-O-methoxy nucleoside
  modified_base 19: mod_base = OTHER; note = 2'-O-methoxy nucleoside
  modified_base 20: mod_base = OTHER; note = 2'-O-methoxy nucleoside
  modified_base 21: mod_base = OTHER; note = 2'-O-methoxy nucleoside with phosphorothioate bond
  modified_base 22: mod_base = OTHER; note = 2'-O-methoxy nucleoside with phosphorothioate bond
  modified_base 23: mod_base = OTHER; note = 2'-O-methoxy nucleoside
atccagaaagctaagcctccatt

SEQ ID NO: 384 - RNA, 23 nt, synthetic construct
  source 1..23: mol_type = other RNA
  modified_base 1: mod_base = OTHER; note = 2'-O-methoxy nucleoside with phosphorothioate bond
  modified_base 2: mod_base = OTHER; note = 2'-fluoro nucleoside with phosphorothioate bond
  modified_base 3: mod_base = OTHER; note = 2'-O-methoxy nucleoside
  modified_base 4: mod_base = OTHER; note = 2'-O-methoxy nucleoside
  modified_base 5: mod_base = OTHER; note = 2'-O-methoxy nucleoside
  modified_base 6: mod_base = OTHER; note = 2'-fluoro nucleoside
  modified_base 7: mod_base = OTHER; note = 2'-O-methoxy nucleoside
  modified_base 8: mod_base = OTHER; note = 2'-O-methoxy nucleoside
  modified_base 9: mod_base = OTHER; note = 2'-O-methoxy nucleoside
  modified_base 10: mod_base = OTHER; note = 2'-O-methoxy nucleoside
  modified_base 11: mod_base = OTHER; note = 2'-O-methoxy nucleoside
  modified_base 12: mod_base = OTHER; note = 2'-O-methoxy nucleoside
  modified_base 13: mod_base = OTHER; note = 2'-O-methoxy nucleoside
  modified_base 14: mod_base = OTHER; note = 2'-fluoro nucleoside
  modified_base 15: mod_base = OTHER; note = 2'-O-methoxy nucleoside
  modified_base 16: mod_base = OTHER; note = 2'-fluoro nucleoside
  modified_base 17: mod_base = OTHER; note = 2'-O-methoxy nucleoside
  modified_base 18: mod_base = OTHER; note = 2'-O-methoxy nucleoside
  modified_base 19: mod_base = OTHER; note = 2'-O-methoxy nucleoside
  modified_base 20: mod_base = OTHER; note = 2'-O-methoxy nucleoside
  modified_base 21: mod_base = OTHER; note = 2'-O-methoxy nucleoside with phosphorothioate bond
  modified_base 22: mod_base = OTHER; note = 2'-O-methoxy nucleoside with phosphorothioate bond
  modified_base 23: mod_base = OTHER; note = 2'-O-methoxy nucleoside
aatatcttcaagttacaaaagca

SEQ ID NO: 385 - RNA, 23 nt, synthetic construct
  source 1..23: mol_type = other RNA
  modified_base 1: mod_base = OTHER; note = 2'-O-methoxy nucleoside with phosphorothioate bond
  modified_base 2: mod_base = OTHER; note = 2'-fluoro nucleoside with phosphorothioate bond
  modified_base 3: mod_base = OTHER; note = 2'-fluoro nucleoside
  modified_base 4: mod_base = OTHER; note = 2'-fluoro nucleoside
  modified_base 5: mod_base = OTHER; note = 2'-O-methoxy nucleoside
  modified_base 6: mod_base = OTHER; note = 2'-fluoro nucleoside
  modified_base 7: mod_base = OTHER; note = 2'-O-methoxy nucleoside
  modified_base 8: mod_base = OTHER; note = 2'-O-methoxy nucleoside
  modified_base 9: mod_base = OTHER; note = 2'-O-methoxy nucleoside
  modified_base 10: mod_base = OTHER; note = 2'-O-methoxy nucleoside
  modified_base 11: mod_base = OTHER; note = 2'-O-methoxy nucleoside
  modified_base 12: mod_base = OTHER; note = 2'-O-methoxy nucleoside
  modified_base 13: mod_base = OTHER; note = 2'-O-methoxy nucleoside
  modified_base 14: mod_base = OTHER; note = 2'-fluoro nucleoside
  modified_base 15: mod_base = OTHER; note = 2'-O-methoxy nucleoside
  modified_base 16: mod_base = OTHER; note = 2'-fluoro nucleoside
  modified_base 17: mod_base = OTHER; note = 2'-O-methoxy nucleoside
  modified_base 18: mod_base = OTHER; note = 2'-O-methoxy nucleoside
  modified_base 19: mod_base = OTHER; note = 2'-O-methoxy nucleoside
  modified_base 20: mod_base = OTHER; note = 2'-O-methoxy nucleoside
  modified_base 21: mod_base = OTHER; note = 2'-O-methoxy nucleoside with phosphorothioate bond
  modified_base 22: mod_base = OTHER; note = 2'-O-methoxy nucleoside with phosphorothioate bond
  modified_base 23: mod_base = OTHER; note = 2'-O-methoxy nucleoside
aatatcttcaagttacaaaagca

SEQ ID NO: 386 - RNA, 23 nt, synthetic construct
  source 1..23: mol_type = other RNA
  modified_base 1: mod_base = OTHER; note = 2'-O-methoxy nucleoside with phosphorothioate bond
  modified_base 2: mod_base = OTHER; note = 2'-fluoro nucleoside with phosphorothioate bond
  modified_base 3: mod_base = OTHER; note = 2'-O-methoxy nucleoside
  modified_base 4: mod_base = OTHER; note = 2'-fluoro nucleoside
  modified_base 5: mod_base = OTHER; note = 2'-fluoro nucleoside
  modified_base 6: mod_base = OTHER; note = 2'-fluoro nucleoside
  modified_base 7: mod_base = OTHER; note = 2'-O-methoxy nucleoside
  modified_base 8: mod_base = OTHER; note = 2'-O-methoxy nucleoside
  modified_base 9: mod_base = OTHER; note = 2'-O-methoxy nucleoside
  modified_base 10: mod_base = OTHER; note = 2'-O-methoxy nucleoside
  modified_base 11: mod_base = OTHER; note = 2'-O-methoxy nucleoside
  modified_base 12: mod_base = OTHER; note = 2'-O-methoxy nucleoside
  modified_base 13: mod_base = OTHER; note = 2'-O-methoxy nucleoside
  modified_base 14: mod_base = OTHER; note = 2'-fluoro nucleoside
  modified_base 15: mod_base = OTHER; note = 2'-O-methoxy nucleoside
  modified_base 16: mod_base = OTHER; note = 2'-fluoro nucleoside
  modified_base 17: mod_base = OTHER; note = 2'-O-methoxy nucleoside
  modified_base 18: mod_base = OTHER; note = 2'-O-methoxy nucleoside
  modified_base 19: mod_base = OTHER; note = 2'-O-methoxy nucleoside
  modified_base 20: mod_base = OTHER; note = 2'-O-methoxy nucleoside
  modified_base 21: mod_base = OTHER; note = 2'-O-methoxy nucleoside with phosphorothioate bond
  modified_base 22: mod_base = OTHER; note = 2'-O-methoxy nucleoside with phosphorothioate bond
  modified_base 23: mod_base = OTHER; note = 2'-O-methoxy nucleoside
aatatcttcaagttacaaaagca

SEQ ID NO: 387 - RNA, 23 nt, synthetic construct
  source 1..23: mol_type = other RNA
  modified_base 1: mod_base = OTHER; note = 2'-O-methoxy nucleoside with phosphorothioate bond
  modified_base 2: mod_base = OTHER; note = 2'-fluoro nucleoside with phosphorothioate bond
  modified_base 3: mod_base = OTHER; note = 2'-O-methoxy nucleoside
  modified_base 4: mod_base = OTHER; note = 2'-O-methoxy nucleoside
  modified_base 5: mod_base = OTHER; note = 2'-O-methoxy nucleoside
  modified_base 6: mod_base = OTHER; note = 2'-fluoro nucleoside
  modified_base 7: mod_base = OTHER; note = 2'-O-methoxy nucleoside
  modified_base 8: mod_base = OTHER; note = 2'-O-methoxy nucleoside
  modified_base 9: mod_base = OTHER; note = 2'-O-methoxy nucleoside
  modified_base 10: mod_base = OTHER; note = 2'-O-methoxy nucleoside
  modified_base 11: mod_base = OTHER; note = 2'-O-methoxy nucleoside
  modified_base 12: mod_base = OTHER; note = 2'-O-methoxy nucleoside
  modified_base 13: mod_base = OTHER; note = 2'-O-methoxy nucleoside
  modified_base 14: mod_base = OTHER; note = 2'-fluoro nucleoside
  modified_base 15: mod_base = OTHER; note = 2'-O-methoxy nucleoside
  modified_base 16: mod_base = OTHER; note = 2'-O-methoxy nucleoside
  modified_base 17: mod_base = OTHER; note = 2'-O-methoxy nucleoside
  modified_base 18: mod_base = OTHER; note = 2'-O-methoxy nucleoside
  modified_base 19: mod_base = OTHER; note = 2'-O-methoxy nucleoside
  modified_base 20: mod_base = OTHER; note = 2'-O-methoxy nucleoside
  modified_base 21: mod_base = OTHER; note = 2'-O-methoxy nucleoside with phosphorothioate bond
  modified_base 22: mod_base = OTHER; note = 2'-O-methoxy nucleoside with phosphorothioate bond
  modified_base 23: mod_base = OTHER; note = 2'-O-methoxy nucleoside
aatatcttcaagttacaaaagca

SEQ ID NO: 388 - RNA, 23 nt, synthetic construct
  source 1..23: mol_type = other RNA
  modified_base 1: mod_base = OTHER; note = 2'-O-methoxy nucleoside with phosphorothioate bond
  modified_base 2: mod_base = OTHER; note = 2'-fluoro nucleoside with phosphorothioate bond
  modified_base 3: mod_base = OTHER; note = 2'-O-methoxy nucleoside
  modified_base 4: mod_base = OTHER; note = 2'-O-methoxy nucleoside
  modified_base 5: mod_base = OTHER; note = 2'-O-methoxy nucleoside
  modified_base 6: mod_base = OTHER; note = 2'-fluoro nucleoside
  modified_base 7: mod_base = OTHER; note = 2'-O-methoxy nucleoside
  modified_base 8: mod_base = OTHER; note = 2'-O-methoxy nucleoside
  modified_base 9: mod_base = OTHER; note = 2'-O-methoxy nucleoside
  modified_base 10: mod_base = OTHER; note = 2'-O-methoxy nucleoside
  modified_base 11: mod_base = OTHER; note = 2'-O-methoxy nucleoside
  modified_base 12: mod_base = OTHER; note = 2'-O-methoxy nucleoside
  modified_base 13: mod_base = OTHER; note = 2'-O-methoxy nucleoside
  modified_base 14: mod_base = OTHER; note = 2'-fluoro nucleoside
  modified_base 15: mod_base = OTHER; note = 2'-O-methoxy nucleoside
  modified_base 16: mod_base = OTHER; note = 2'-fluoro nucleoside
  modified_base 17: mod_base = OTHER; note = 2'-O-methoxy nucleoside
  modified_base 18: mod_base = OTHER; note = 2'-O-methoxy nucleoside
  modified_base 19: mod_base = OTHER; note = 2'-O-methoxy nucleoside
  modified_base 20: mod_base = OTHER; note = 2'-O-methoxy nucleoside
  modified_base 21: mod_base = OTHER; note = 2'-O-methoxy nucleoside with phosphorothioate bond
  modified_base 22: mod_base = OTHER; note = 2'-O-methoxy nucleoside with phosphorothioate bond
  modified_base 23: mod_base = OTHER; note = 2'-O-methoxy nucleoside
aaacccagaataaatatcttcaa

SEQ ID NO: 389 - RNA, 23 nt, synthetic construct
  source 1..23: mol_type = other RNA
  modified_base 1: mod_base = OTHER; note = 2'-O-methoxy nucleoside with phosphorothioate bond
  modified_base 2: mod_base = OTHER; note = 2'-fluoro nucleoside with phosphorothioate bond
  modified_base 3: mod_base = OTHER; note = 2'-fluoro nucleoside
  modified_base 4: mod_base = OTHER; note = 2'-fluoro nucleoside
  modified_base 5: mod_base = OTHER; note = 2'-O-methoxy nucleoside
  modified_base 6: mod_base = OTHER; note = 2'-fluoro nucleoside
  modified_base 7: mod_base = OTHER; note = 2'-O-methoxy nucleoside
  modified_base 8: mod_base = OTHER; note = 2'-O-methoxy nucleoside
  modified_base 9: mod_base = OTHER; note = 2'-O-methoxy nucleoside
  modified_base 10: mod_base = OTHER; note = 2'-O-methoxy nucleoside
  modified_base 11: mod_base = OTHER; note = 2'-O-methoxy nucleoside
  modified_base 12: mod_base = OTHER; note = 2'-O-methoxy nucleoside
  modified_base 13: mod_base = OTHER; note = 2'-O-methoxy nucleoside
  modified_base 14: mod_base = OTHER; note = 2'-fluoro nucleoside
  modified_base 15: mod_base = OTHER; note = 2'-O-methoxy nucleoside
  modified_base 16: mod_base = OTHER; note = 2'-fluoro nucleoside
  modified_base 17: mod_base = OTHER; note = 2'-O-methoxy nucleoside
  modified_base 18: mod_base = OTHER; note = 2'-O-methoxy nucleoside
  modified_base 19: mod_base = OTHER; note = 2'-O-methoxy nucleoside
  modified_base 20: mod_base = OTHER; note = 2'-O-methoxy nucleoside
  modified_base 21: mod_base = OTHER; note = 2'-O-methoxy nucleoside with phosphorothioate bond
  modified_base 22: mod_base = OTHER; note = 2'-O-methoxy nucleoside with phosphorothioate bond
  modified_base 23: mod_base = OTHER; note = 2'-O-methoxy nucleoside
aaacccagaataaatatcttcaa

SEQ ID NO: 390 - RNA, 23 nt, synthetic construct
  source 1..23: mol_type = other RNA
  modified_base 1: mod_base = OTHER; note = 2'-O-methoxy nucleoside with phosphorothioate bond
  modified_base 2: mod_base = OTHER; note = 2'-fluoro nucleoside with phosphorothioate bond
  modified_base 3: mod_base = OTHER; note = 2'-O-methoxy nucleoside
  modified_base 4: mod_base = OTHER; note = 2'-fluoro nucleoside
  modified_base 5: mod_base = OTHER; note = 2'-fluoro nucleoside
  modified_base 6: mod_base = OTHER; note = 2'-fluoro nucleoside
  modified_base 7: mod_base = OTHER; note = 2'-O-methoxy nucleoside
  modified_base 8: mod_base = OTHER; note = 2'-O-methoxy nucleoside
  modified_base 9: mod_base = OTHER; note = 2'-O-methoxy nucleoside
  modified_base 10: mod_base = OTHER; note = 2'-O-methoxy nucleoside
  modified_base 11: mod_base = OTHER; note = 2'-O-methoxy nucleoside
  modified_base 12: mod_base = OTHER; note = 2'-O-methoxy nucleoside
  modified_base 13: mod_base = OTHER; note = 2'-O-methoxy nucleoside
  modified_base 14: mod_base = OTHER; note = 2'-fluoro nucleoside
  modified_base 15: mod_base = OTHER; note = 2'-O-methoxy nucleoside
  modified_base 16: mod_base = OTHER; note = 2'-fluoro nucleoside
  modified_base 17: mod_base = OTHER; note = 2'-O-methoxy nucleoside
  modified_base 18: mod_base = OTHER; note = 2'-O-methoxy nucleoside
  modified_base 19: mod_base = OTHER; note = 2'-O-methoxy nucleoside
  modified_base 20: mod_base = OTHER; note = 2'-O-methoxy nucleoside
  modified_base 21: mod_base = OTHER; note = 2'-O-methoxy nucleoside with phosphorothioate bond
  modified_base 22: mod_base = OTHER; note = 2'-O-methoxy nucleoside with phosphorothioate bond
  modified_base 23: mod_base = OTHER; note = 2'-O-methoxy nucleoside
aaacccagaataaatatcttcaa

SEQ ID NO: 391 - RNA, 23 nt, synthetic construct
  source 1..23: mol_type = other RNA
  modified_base 1: mod_base = OTHER; note = 2'-O-methoxy nucleoside with phosphorothioate bond
  modified_base 2: mod_base = OTHER; note = 2'-fluoro nucleoside with phosphorothioate bond
  modified_base 3: mod_base = OTHER; note = 2'-O-methoxy nucleoside
  modified_base 4: mod_base = OTHER; note = 2'-O-methoxy nucleoside
  modified_base 5: mod_base = OTHER; note = 2'-O-methoxy nucleoside
  modified_base 6: mod_base = OTHER; note = 2'-fluoro nucleoside
  modified_base 7: mod_base = OTHER; note = 2'-O-methoxy nucleoside
  modified_base 8: mod_base = OTHER; note = 2'-O-methoxy nucleoside
  modified_base 9: mod_base = OTHER; note = 2'-O-methoxy nucleoside
  modified_base 10: mod_base = OTHER; note = 2'-O-methoxy nucleoside
  modified_base 11: mod_base = OTHER; note = 2'-O-methoxy nucleoside
  modified_base 12: mod_base = OTHER; note = 2'-O-methoxy nucleoside
  modified_base 13: mod_base = OTHER; note = 2'-O-methoxy nucleoside
  modified_base 14: mod_base = OTHER; note = 2'-fluoro nucleoside
  modified_base 15: mod_base = OTHER; note = 2'-O-methoxy nucleoside
  modified_base 16: mod_base = OTHER; note = 2'-O-methoxy nucleoside
  modified_base 17: mod_base = OTHER; note = 2'-O-methoxy nucleoside
  modified_base 18: mod_base = OTHER; note = 2'-O-methoxy nucleoside
  modified_base 19: mod_base = OTHER; note = 2'-O-methoxy nucleoside
  modified_base 20: mod_base = OTHER; note = 2'-O-methoxy nucleoside
  modified_base 21: mod_base = OTHER; note = 2'-O-methoxy nucleoside with phosphorothioate bond
  modified_base 22: mod_base = OTHER; note = 2'-O-methoxy nucleoside with phosphorothioate bond
  modified_base 23: mod_base = OTHER; note = 2'-O-methoxy nucleoside
aaacccagaataaatatcttcaa

SEQ ID NO: 392 - RNA, 23 nt, synthetic construct
  source 1..23: mol_type = other RNA
  modified_base 1: mod_base = OTHER; note = 2'-O-methoxy nucleoside with phosphorothioate bond
  modified_base 2: mod_base = OTHER; note = 2'-fluoro nucleoside with phosphorothioate bond
  modified_base 3: mod_base = OTHER; note = 2'-O-methoxy nucleoside
  modified_base 4: mod_base = OTHER; note = 2'-O-methoxy nucleoside
  modified_base 5: mod_base = OTHER; note = 2'-O-methoxy nucleoside
  modified_base 6: mod_base = OTHER; note = 2'-fluoro nucleoside
  modified_base 7: mod_base = OTHER; note = 2'-O-methoxy nucleoside
  modified_base 8: mod_base = OTHER; note = 2'-O-methoxy nucleoside
  modified_base 9: mod_base = OTHER; note = 2'-O-methoxy nucleoside
  modified_base 10: mod_base = OTHER; note = 2'-O-methoxy nucleoside
  modified_base 11: mod_base = OTHER; note = 2'-O-methoxy nucleoside
  modified_base 12: mod_base = OTHER; note = 2'-O-methoxy nucleoside
  modified_base 13: mod_base = OTHER; note = 2'-O-methoxy nucleoside
  modified_base 14: mod_base = OTHER; note = 2'-fluoro nucleoside
  modified_base 15: mod_base = OTHER; note = 2'-O-methoxy nucleoside
  modified_base 16: mod_base = OTHER; note = 2'-fluoro nucleoside
  modified_base 17: mod_base = OTHER; note = 2'-O-methoxy nucleoside
  modified_base 18: mod_base = OTHER; note = 2'-O-methoxy nucleoside
  modified_base 19: mod_base = OTHER; note = 2'-O-methoxy nucleoside
  modified_base 20: mod_base = OTHER; note = 2'-O-methoxy nucleoside
  modified_base 21: mod_base = OTHER; note = 2'-O-methoxy nucleoside with phosphorothioate bond
  modified_base 22: mod_base = OTHER; note = 2'-O-methoxy nucleoside with phosphorothioate bond
  modified_base 23: mod_base = OTHER; note = 2'-O-methoxy nucleoside
ttaataaaaatgctacaaaaccc

SEQ ID NO: 393 - RNA, 23 nt, synthetic construct
  source 1..23: mol_type = other RNA
  modified_base 1: mod_base = OTHER; note = 2'-O-methoxy nucleoside with phosphorothioate bond
  modified_base 2: mod_base = OTHER; note = 2'-fluoro nucleoside with phosphorothioate bond
  modified_base 3: mod_base = OTHER; note = 2'-fluoro nucleoside
  modified_base 4: mod_base = OTHER; note = 2'-fluoro nucleoside
  modified_base 5: mod_base = OTHER; note = 2'-O-methoxy nucleoside
  modified_base 6: mod_base = OTHER; note = 2'-fluoro nucleoside
  modified_base 7: mod_base = OTHER; note = 2'-O-methoxy nucleoside
  modified_base 8: mod_base = OTHER; note = 2'-O-methoxy nucleoside
  modified_base 9: mod_base = OTHER; note = 2'-O-methoxy nucleoside
  modified_base 10: mod_base = OTHER; note = 2'-O-methoxy nucleoside
  modified_base 11: mod_base = OTHER; note = 2'-O-methoxy nucleoside
  modified_base 12: mod_base = OTHER; note = 2'-O-methoxy nucleoside
  modified_base 13: mod_base = OTHER; note = 2'-O-methoxy nucleoside
  modified_base 14: mod_base = OTHER; note = 2'-fluoro nucleoside
  modified_base 15: mod_base = OTHER; note = 2'-O-methoxy nucleoside
  modified_base 16: mod_base = OTHER; note = 2'-fluoro nucleoside
  modified_base 17: mod_base = OTHER; note = 2'-O-methoxy nucleoside
  modified_base 18: mod_base = OTHER; note = 2'-O-methoxy nucleoside
  modified_base 19: mod_base = OTHER; note = 2'-O-methoxy nucleoside
  modified_base 20: mod_base = OTHER; note = 2'-O-methoxy nucleoside
  modified_base 21: mod_base = OTHER; note = 2'-O-methoxy nucleoside with phosphorothioate bond
  modified_base 22: mod_base = OTHER; note = 2'-O-methoxy nucleoside with phosphorothioate bond
  modified_base 23: mod_base = OTHER; note = 2'-O-methoxy nucleoside
ttaataaaaatgctacaaaaccc

SEQ ID NO: 394 - RNA, 23 nt, synthetic construct
  source 1..23: mol_type = other RNA
  modified_base 1: mod_base = OTHER; note = 2'-O-methoxy nucleoside with phosphorothioate bond
  modified_base 2: mod_base = OTHER; note = 2'-fluoro nucleoside with phosphorothioate bond
  modified_base 3: mod_base = OTHER; note = 2'-O-methoxy nucleoside
  modified_base 4: mod_base = OTHER; note = 2'-fluoro nucleoside
  modified_base 5: mod_base = OTHER; note = 2'-fluoro nucleoside
  modified_base 6: mod_base = OTHER; note = 2'-fluoro nucleoside
  modified_base 7: mod_base = OTHER; note = 2'-O-methoxy nucleoside
  modified_base 8: mod_base = OTHER; note = 2'-O-methoxy nucleoside
  modified_base 9: mod_base = OTHER; note = 2'-O-methoxy nucleoside
  modified_base 10: mod_base = OTHER; note = 2'-O-methoxy nucleoside
  modified_base 11: mod_base = OTHER; note = 2'-O-methoxy nucleoside
  modified_base 12: mod_base = OTHER; note = 2'-O-methoxy nucleoside
  modified_base 13: mod_base = OTHER; note = 2'-O-methoxy nucleoside
  modified_base 14: mod_base = OTHER; note = 2'-fluoro nucleoside
  modified_base 15: mod_base = OTHER; note = 2'-O-methoxy nucleoside
  modified_base 16: mod_base = OTHER; note = 2'-fluoro nucleoside
  modified_base 17: mod_base = OTHER; note = 2'-O-methoxy nucleoside
  modified_base 18: mod_base = OTHER; note = 2'-O-methoxy nucleoside
  modified_base 19: mod_base = OTHER; note = 2'-O-methoxy nucleoside
  modified_base 20: mod_base = OTHER; note = 2'-O-methoxy nucleoside
  modified_base 21: mod_base = OTHER; note = 2'-O-methoxy nucleoside with phosphorothioate bond
  modified_base 22: mod_base = OTHER; note = 2'-O-methoxy nucleoside with phosphorothioate bond
  modified_base 23: mod_base = OTHER; note = 2'-O-methoxy nucleoside
ttaataaaaatgctacaaaaccc

SEQ ID NO: 395 - RNA, 23 nt, synthetic construct
  source 1..23: mol_type = other RNA
  modified_base 1: mod_base = OTHER; note = 2'-O-methoxy nucleoside with phosphorothioate bond
  modified_base 2: mod_base = OTHER; note = 2'-fluoro nucleoside with phosphorothioate bond
  modified_base 3: mod_base = OTHER; note = 2'-O-methoxy nucleoside
  modified_base 4: mod_base = OTHER; note = 2'-O-methoxy nucleoside
  modified_base 5: mod_base = OTHER; note = 2'-O-methoxy nucleoside
  modified_base 6: mod_base = OTHER; note = 2'-fluoro nucleoside
  modified_base 7: mod_base = OTHER; note = 2'-O-methoxy nucleoside
  modified_base 8: mod_base = OTHER; note = 2'-O-methoxy nucleoside
  modified_base 9: mod_base = OTHER; note = 2'-O-methoxy nucleoside
  modified_base 10: mod_base = OTHER; note = 2'-O-methoxy nucleoside
  modified_base 11: mod_base = OTHER; note = 2'-O-methoxy nucleoside
  modified_base 12: mod_base = OTHER; note = 2'-O-methoxy nucleoside
  modified_base 13: mod_base = OTHER; note = 2'-O-methoxy nucleoside
  modified_base 14: mod_base = OTHER; note = 2'-fluoro nucleoside
  modified_base 15: mod_base = OTHER; note = 2'-O-methoxy nucleoside
  modified_base 16: mod_base = OTHER; note = 2'-O-methoxy nucleoside
  modified_base 17: mod_base = OTHER; note = 2'-O-methoxy nucleoside
  modified_base 18: mod_base = OTHER; note = 2'-O-methoxy nucleoside
  modified_base 19: mod_base = OTHER; note = 2'-O-methoxy nucleoside
  modified_base 20: mod_base = OTHER; note = 2'-O-methoxy nucleoside
  modified_base 21: mod_base = OTHER; note = 2'-O-methoxy nucleoside with phosphorothioate bond
  modified_base 22: mod_base = OTHER; note = 2'-O-methoxy nucleoside with phosphorothioate bond
  modified_base 23: mod_base = OTHER; note = 2'-O-methoxy nucleoside
ttaataaaaatgctacaaaaccc

SEQ ID NO: 396 - RNA, 23 nt, synthetic construct
  source 1..23: mol_type = other RNA
  modified_base 1: mod_base = OTHER; note = 2'-O-methoxy nucleoside with phosphorothioate bond
  modified_base 2: mod_base = OTHER; note = 2'-fluoro nucleoside with phosphorothioate bond
  modified_base 3: mod_base = OTHER; note = 2'-O-methoxy nucleoside
  modified_base 4: mod_base = OTHER; note = 2'-O-methoxy nucleoside
  modified_base 5: mod_base = OTHER; note = 2'-O-methoxy nucleoside
  modified_base 6: mod_base = OTHER; note = 2'-fluoro nucleoside
  modified_base 7: mod_base = OTHER; note = 2'-O-methoxy nucleoside
  modified_base 8: mod_base = OTHER; note = 2'-O-methoxy nucleoside
  modified_base 9: mod_base = OTHER; note = 2'-O-methoxy nucleoside
  modified_base 10: mod_base = OTHER; note = 2'-O-methoxy nucleoside
  modified_base 11: mod_base = OTHER; note = 2'-O-methoxy nucleoside
  modified_base 12: mod_base = OTHER; note = 2'-O-methoxy nucleoside
  modified_base 13: mod_base = OTHER; note = 2'-O-methoxy nucleoside
  modified_base 14: mod_base = OTHER; note = 2'-fluoro nucleoside
  modified_base 15: mod_base = OTHER; note = 2'-O-methoxy nucleoside
  modified_base 16: mod_base = OTHER; note = 2'-fluoro nucleoside
  modified_base 17: mod_base = OTHER; note = 2'-O-methoxy nucleoside
  modified_base 18: mod_base = OTHER; note = 2'-O-methoxy nucleoside
  modified_base 19: mod_base = OTHER; note = 2'-O-methoxy nucleoside
  modified_base 20: mod_base = OTHER; note = 2'-O-methoxy nucleoside
  modified_base 21: mod_base = OTHER; note = 2'-O-methoxy nucleoside with phosphorothioate bond
  modified_base 22: mod_base = OTHER; note = 2'-O-methoxy nucleoside with phosphorothioate bond
  modified_base 23: mod_base = OTHER; note = 2'-O-methoxy nucleoside
aagacatgcaggatcttggtgag

SEQ ID NO: 397 - RNA, 23 nt, synthetic construct
  source 1..23: mol_type = other RNA
  modified_base 1: mod_base = OTHER; note = 2'-O-methoxy nucleoside with phosphorothioate bond
  modified_base 2: mod_base = OTHER; note = 2'-fluoro nucleoside with phosphorothioate bond
  modified_base 3: mod_base = OTHER; note = 2'-fluoro nucleoside
  modified_base 4: mod_base = OTHER; note = 2'-fluoro nucleoside
  modified_base 5: mod_base = OTHER; note = 2'-O-methoxy nucleoside
  modified_base 6: mod_base = OTHER; note = 2'-fluoro nucleoside
  modified_base 7: mod_base = OTHER; note = 2'-O-methoxy nucleoside
  modified_base 8: mod_base = OTHER; note = 2'-O-methoxy nucleoside
  modified_base 9: mod_base = OTHER; note = 2'-O-methoxy nucleoside
  modified_base 10: mod_base = OTHER; note = 2'-O-methoxy nucleoside
  modified_base 11: mod_base = OTHER; note = 2'-O-methoxy nucleoside
  modified_base 12: mod_base = OTHER; note = 2'-O-methoxy nucleoside
  modified_base 13: mod_base = OTHER; note = 2'-O-methoxy nucleoside
  modified_base 14: mod_base = OTHER; note = 2'-fluoro nucleoside
  modified_base 15: mod_base = OTHER; note = 2'-O-methoxy nucleoside
  modified_base 16: mod_base = OTHER; note = 2'-fluoro nucleoside
  modified_base 17: mod_base = OTHER; note = 2'-O-methoxy nucleoside
  modified_base 18: mod_base = OTHER; note = 2'-O-methoxy nucleoside
  modified_base 19: mod_base = OTHER; note = 2'-O-methoxy nucleoside
  modified_base 20: mod_base = OTHER; note = 2'-O-methoxy nucleoside
  modified_base 21: mod_base = OTHER; note = 2'-O-methoxy nucleoside with phosphorothioate bond
  modified_base 22: mod_base = OTHER; note = 2'-O-methoxy nucleoside with phosphorothioate bond
  modified_base 23: mod_base = OTHER; note = 2'-O-methoxy nucleoside
aagacatgcaggatcttggtgag

SEQ ID NO: 398 - RNA, 23 nt, synthetic construct
  source 1..23: mol_type = other RNA
  modified_base 1: mod_base = OTHER; note = 2'-O-methoxy nucleoside with phosphorothioate bond
  modified_base 2: mod_base = OTHER; note = 2'-fluoro nucleoside with phosphorothioate bond
  modified_base 3: mod_base = OTHER; note = 2'-O-methoxy nucleoside
  modified_base 4: mod_base = OTHER; note = 2'-fluoro nucleoside
  modified_base 5: mod_base = OTHER; note = 2'-fluoro nucleoside
  modified_base 6: mod_base = OTHER; note = 2'-fluoro nucleoside
  modified_base 7: mod_base = OTHER; note = 2'-O-methoxy nucleoside
  modified_base 8: mod_base = OTHER; note = 2'-O-methoxy nucleoside
  modified_base 9: mod_base = OTHER; note = 2'-O-methoxy nucleoside
  modified_base 10: mod_base = OTHER; note = 2'-O-methoxy nucleoside
  modified_base 11: mod_base = OTHER; note = 2'-O-methoxy nucleoside
  modified_base 12: mod_base = OTHER; note = 2'-O-methoxy nucleoside
  modified_base 13: mod_base = OTHER; note = 2'-O-methoxy nucleoside
  modified_base 14: mod_base = OTHER; note = 2'-fluoro nucleoside
  modified_base 15: mod_base = OTHER; note = 2'-O-methoxy nucleoside
  modified_base 16: mod_base = OTHER; note = 2'-fluoro nucleoside
  modified_base 17: mod_base = OTHER; note = 2'-O-methoxy nucleoside
  modified_base 18: mod_base = OTHER; note = 2'-O-methoxy nucleoside
  modified_base 19: mod_base = OTHER; note = 2'-O-methoxy nucleoside
  modified_base 20: mod_base = OTHER; note = 2'-O-methoxy nucleoside
  modified_base 21: mod_base = OTHER; note = 2'-O-methoxy nucleoside with phosphorothioate bond
  modified_base 22: mod_base = OTHER; note = 2'-O-methoxy nucleoside with phosphorothioate bond
  modified_base 23: mod_base = OTHER; note = 2'-O-methoxy nucleoside
aagacatgcaggatcttggtgag

SEQ ID NO: 399 - RNA, 23 nt, synthetic construct
  source 1..23: mol_type = other RNA
  modified_base 1: mod_base = OTHER; note = 2'-O-methoxy nucleoside with phosphorothioate bond
  modified_base 2: mod_base = OTHER; note = 2'-fluoro nucleoside with phosphorothioate bond
  modified_base 3: mod_base = OTHER; note = 2'-O-methoxy nucleoside
  modified_base 4: mod_base = OTHER; note = 2'-O-methoxy nucleoside
  modified_base 5: mod_base = OTHER; note = 2'-O-methoxy nucleoside
  modified_base 6: mod_base = OTHER; note = 2'-fluoro nucleoside
  modified_base 7: mod_base = OTHER; note = 2'-O-methoxy nucleoside
  modified_base 8: mod_base = OTHER; note = 2'-O-methoxy nucleoside
  modified_base 9: mod_base = OTHER; note = 2'-O-methoxy nucleoside
  modified_base 10: mod_base = OTHER; note = 2'-O-methoxy nucleoside
  modified_base 11: mod_base = OTHER; note = 2'-O-methoxy nucleoside
  modified_base 12: mod_base = OTHER; note = 2'-O-methoxy nucleoside
  modified_base 13: mod_base = OTHER; note = 2'-O-methoxy nucleoside
  modified_base 14: mod_base = OTHER; note = 2'-fluoro nucleoside
  modified_base 15: mod_base = OTHER; note = 2'-O-methoxy nucleoside
  modified_base 16: mod_base = OTHER; note = 2'-fluoro nucleoside
  modified_base 17: mod_base = OTHER; note = 2'-O-methoxy nucleoside
  modified_base 18: mod_base = OTHER; note = 2'-O-methoxy nucleoside
  modified_base 19: mod_base = OTHER; note = 2'-O-methoxy nucleoside
  modified_base 20: mod_base = OTHER; note = 2'-O-methoxy nucleoside
  modified_base 21: mod_base = OTHER; note = 2'-O-methoxy nucleoside with phosphorothioate bond
  modified_base 22: mod_base = OTHER; note = 2'-O-methoxy nucleoside with phosphorothioate bond
  modified_base 23: mod_base = OTHER; note = 2'-O-methoxy nucleoside
aataaactccaggcctatgaggg

SEQ ID NO: 400 - RNA, 23 nt, synthetic construct
  source 1..23: mol_type = other RNA
  modified_base 1: mod_base = OTHER; note = 2'-O-methoxy nucleoside with phosphorothioate bond
  modified_base 2: mod_base = OTHER; note = 2'-fluoro nucleoside with phosphorothioate bond
  modified_base 3: mod_base = OTHER; note = 2'-fluoro nucleoside
  modified_base 4: mod_base = OTHER; note = 2'-fluoro nucleoside
  modified_base 5: mod_base = OTHER; note = 2'-O-methoxy nucleoside
  modified_base 6: mod_base = OTHER; note = 2'-fluoro nucleoside
  modified_base 7: mod_base = OTHER; note = 2'-O-methoxy nucleoside
  modified_base 8: mod_base = OTHER; note = 2'-O-methoxy nucleoside
  modified_base 9: mod_base = OTHER; note = 2'-O-methoxy nucleoside
  modified_base 10: mod_base = OTHER; note = 2'-O-methoxy nucleoside
  modified_base 11: mod_base = OTHER; note = 2'-O-methoxy nucleoside
  modified_base 12: mod_base = OTHER; note = 2'-O-methoxy nucleoside
  modified_base 13: mod_base = OTHER; note = 2'-O-methoxy nucleoside
  modified_base 14: mod_base = OTHER; note = 2'-fluoro nucleoside
  modified_base 15: mod_base = OTHER; note = 2'-O-methoxy nucleoside
  modified_base 16: mod_base = OTHER; note = 2'-fluoro nucleoside
  modified_base 17: mod_base = OTHER; note = 2'-O-methoxy nucleoside
  modified_base 18: mod_base = OTHER; note = 2'-O-methoxy nucleoside
  modified_base 19: mod_base = OTHER; note = 2'-O-methoxy nucleoside
  modified_base 20: mod_base = OTHER; note = 2'-O-methoxy nucleoside
  modified_base 21: mod_base = OTHER; note = 2'-O-methoxy nucleoside with phosphorothioate bond
  modified_base 22: mod_base = OTHER; note = 2'-O-methoxy nucleoside with phosphorothioate bond
  modified_base 23: mod_base = OTHER; note = 2'-O-methoxy nucleoside
aataaactccaggcctatgaggg

SEQ ID NO: 401 - RNA, 23 nt, synthetic construct
  source 1..23: mol_type = other RNA
  modified_base 1: mod_base = OTHER; note = 2'-O-methoxy nucleoside with phosphorothioate bond
  modified_base 2: mod_base = OTHER; note = 2'-fluoro nucleoside with phosphorothioate bond
  modified_base 3: mod_base = OTHER; note = 2'-O-methoxy nucleoside
  modified_base 4: mod_base = OTHER; note = 2'-fluoro nucleoside
  modified_base 5: mod_base = OTHER; note = 2'-fluoro nucleoside
  modified_base 6: mod_base = OTHER; note = 2'-fluoro nucleoside
  modified_base 7: mod_base = OTHER; note = 2'-O-methoxy nucleoside
  modified_base 8: mod_base = OTHER; note = 2'-O-methoxy nucleoside
  modified_base 9: mod_base = OTHER; note = 2'-O-methoxy nucleoside
  modified_base 10: mod_base = OTHER; note = 2'-O-methoxy nucleoside
  modified_base 11: mod_base = OTHER; note = 2'-O-methoxy nucleoside
  modified_base 12: mod_base = OTHER; note = 2'-O-methoxy nucleoside
  modified_base 13: mod_base = OTHER; note = 2'-O-methoxy nucleoside
  modified_base 14: mod_base = OTHER; note = 2'-fluoro nucleoside
  modified_base 15: mod_base = OTHER; note = 2'-O-methoxy nucleoside
  modified_base 16: mod_base = OTHER; note = 2'-fluoro nucleoside
  modified_base 17: mod_base = OTHER; note = 2'-O-methoxy nucleoside
  modified_base 18: mod_base = OTHER; note = 2'-O-methoxy nucleoside
  modified_base 19: mod_base = OTHER; note = 2'-O-methoxy nucleoside
  modified_base 20: mod_base = OTHER; note = 2'-O-methoxy nucleoside
  modified_base 21: mod_base = OTHER; note = 2'-O-methoxy nucleoside with phosphorothioate bond
  modified_base 22: mod_base = OTHER; note = 2'-O-methoxy nucleoside with phosphorothioate bond
  modified_base 23: mod_base = OTHER; note = 2'-O-methoxy nucleoside
aataaactccaggcctatgaggg

SEQ ID NO: 402 - RNA, 23 nt, synthetic construct
  source 1..23: mol_type = other RNA
  modified_base 1: mod_base = OTHER; note = 2'-O-methoxy nucleoside with phosphorothioate bond
  modified_base 2: mod_base = OTHER; note = 2'-fluoro nucleoside with phosphorothioate bond
  modified_base 3: mod_base = OTHER; note = 2'-O-methoxy nucleoside
  modified_base 4: mod_base = OTHER; note = 2'-O-methoxy nucleoside
  modified_base 5: mod_base = OTHER; note = 2'-O-methoxy nucleoside
  modified_base 6: mod_base = OTHER; note = 2'-fluoro nucleoside
  modified_base 7: mod_base = OTHER; note = 2'-O-methoxy nucleoside
  modified_base 8: mod_base = OTHER; note = 2'-O-methoxy nucleoside
  modified_base 9: mod_base = OTHER; note = 2'-O-methoxy nucleoside
  modified_base 10: mod_base = OTHER; note = 2'-O-methoxy nucleoside
  modified_base 11: mod_base = OTHER; note = 2'-O-methoxy nucleoside
  modified_base 12: mod_base = OTHER; note = 2'-O-methoxy nucleoside
  modified_base 13: mod_base = OTHER; note = 2'-O-methoxy nucleoside
  modified_base 14: mod_base = OTHER; note = 2'-fluoro nucleoside
  modified_base 15: mod_base = OTHER; note = 2'-O-methoxy nucleoside
  modified_base 16: mod_base = OTHER; note = 2'-fluoro nucleoside
  modified_base 17: mod_base = OTHER; note = 2'-O-methoxy nucleoside
  modified_base 18: mod_base = OTHER; note = 2'-O-methoxy nucleoside
  modified_base 19: mod_base = OTHER; note = 2'-O-methoxy nucleoside
  modified_base 20: mod_base = OTHER; note = 2'-O-methoxy nucleoside
  modified_base 21: mod_base = OTHER; note = 2'-O-methoxy nucleoside with phosphorothioate bond
  modified_base 22: mod_base = OTHER; note = 2'-O-methoxy nucleoside with phosphorothioate bond
  modified_base 23: mod_base = OTHER; note = 2'-O-methoxy nucleoside
tttccgaataaactccaggccta

SEQ ID NO: 403 - RNA, 23 nt, synthetic construct
  source 1..23: mol_type = other RNA
  modified_base 1: mod_base = OTHER; note = 2'-O-methoxy nucleoside with phosphorothioate bond
  modified_base 2: mod_base = OTHER; note = 2'-fluoro nucleoside with phosphorothioate bond
  modified_base 3: mod_base = OTHER; note = 2'-fluoro nucleoside
  modified_base 4: mod_base = OTHER; note = 2'-fluoro nucleoside
  modified_base 5: mod_base = OTHER; note = 2'-O-methoxy nucleoside
  modified_base 6: mod_base = OTHER; note = 2'-fluoro nucleoside
  modified_base 7: mod_base = OTHER; note = 2'-O-methoxy nucleoside
  modified_base 8: mod_base = OTHER; note = 2'-O-methoxy nucleoside
  modified_base 9: mod_base = OTHER; note = 2'-O-methoxy nucleoside
  modified_base 10: mod_base = OTHER; note = 2'-O-methoxy nucleoside
  modified_base 11: mod_base = OTHER; note = 2'-O-methoxy nucleoside
  modified_base 12: mod_base = OTHER; note = 2'-O-methoxy nucleoside
  modified_base 13: mod_base = OTHER; note = 2'-O-methoxy nucleoside
  modified_base 14: mod_base = OTHER; note = 2'-fluoro nucleoside
  modified_base 15: mod_base = OTHER; note = 2'-O-methoxy nucleoside
  modified_base 16: mod_base = OTHER; note = 2'-fluoro nucleoside
  modified_base 17: mod_base = OTHER; note = 2'-O-methoxy nucleoside
  modified_base 18: mod_base = OTHER; note = 2'-O-methoxy nucleoside
  modified_base 19: mod_base = OTHER; note = 2'-O-methoxy nucleoside
  modified_base 20: mod_base = OTHER; note = 2'-O-methoxy nucleoside
  modified_base 21: mod_base = OTHER; note = 2'-O-methoxy nucleoside with phosphorothioate bond
  modified_base 22: mod_base = OTHER; note = 2'-O-methoxy nucleoside with phosphorothioate bond
  modified_base 23: mod_base = OTHER; note = 2'-O-methoxy nucleoside
tttccgaataaactccaggccta

SEQ ID NO: 404 - RNA, 23 nt, synthetic construct
  source 1..23: mol_type = other RNA
  modified_base 1: mod_base = OTHER; note = 2'-O-methoxy nucleoside with phosphorothioate bond
  modified_base 2: mod_base = OTHER; note = 2'-fluoro nucleoside with phosphorothioate bond
  modified_base 3: mod_base = OTHER; note = 2'-O-methoxy nucleoside
  modified_base 4: mod_base = OTHER; note = 2'-fluoro nucleoside
  modified_base 5: mod_base = OTHER; note = 2'-fluoro nucleoside
  modified_base 6: mod_base = OTHER; note = 2'-fluoro nucleoside
  modified_base 7: mod_base = OTHER; note = 2'-O-methoxy nucleoside
  modified_base 8: mod_base = OTHER; note = 2'-O-methoxy nucleoside
  modified_base 9: mod_base = OTHER; note = 2'-O-methoxy nucleoside
  modified_base 10: mod_base = OTHER; note = 2'-O-methoxy nucleoside
  modified_base 11: mod_base = OTHER; note = 2'-O-methoxy nucleoside
  modified_base 12: mod_base = OTHER; note = 2'-O-methoxy nucleoside
  modified_base 13: mod_base = OTHER; note = 2'-O-methoxy nucleoside
  modified_base 14: mod_base = OTHER; note = 2'-fluoro nucleoside
  modified_base 15: mod_base = OTHER; note = 2'-O-methoxy nucleoside
  modified_base 16: mod_base = OTHER; note = 2'-fluoro nucleoside
  modified_base 17: mod_base = OTHER; note = 2'-O-methoxy nucleoside
  modified_base 18: mod_base = OTHER; note = 2'-O-methoxy nucleoside
  modified_base 19: mod_base = OTHER; note = 2'-O-methoxy nucleoside
  modified_base 20: mod_base = OTHER; note = 2'-O-methoxy nucleoside
  modified_base 21: mod_base = OTHER; note = 2'-O-methoxy nucleoside with phosphorothioate bond
  modified_base 22: mod_base = OTHER; note = 2'-O-methoxy nucleoside with phosphorothioate bond
  modified_base 23: mod_base = OTHER; note = 2'-O-methoxy nucleoside
tttccgaataaactccaggccta

SEQ ID NO: 405 - RNA, 23 nt, synthetic construct
  source 1..23: mol_type = other RNA
  modified_base 1: mod_base = OTHER; note = 2'-O-methoxy nucleoside with phosphorothioate bond
  modified_base 2: mod_base = OTHER; note = 2'-fluoro nucleoside with phosphorothioate bond
  modified_base 3: mod_base = OTHER; note = 2'-O-methoxy nucleoside
  modified_base 4: mod_base = OTHER; note = 2'-O-methoxy nucleoside
  modified_base 5: mod_base = OTHER; note = 2'-O-methoxy nucleoside
  modified_base 6: mod_base = OTHER; note = 2'-fluoro nucleoside
  modified_base 7: mod_base = OTHER; note = 2'-O-methoxy nucleoside
  modified_base 8: mod_base = OTHER; note = 2'-O-methoxy nucleoside
  modified_base 9: mod_base = OTHER; note = 2'-O-methoxy nucleoside
  modified_base 10: mod_base = OTHER; note = 2'-O-methoxy nucleoside
  modified_base 11: mod_base = OTHER; note = 2'-O-methoxy nucleoside
  modified_base 12: mod_base = OTHER; note = 2'-O-methoxy nucleoside
  modified_base 13: mod_base = OTHER; note = 2'-O-methoxy nucleoside
  modified_base 14: mod_base = OTHER; note = 2'-fluoro nucleoside
  modified_base 15: mod_base = OTHER; note = 2'-O-methoxy nucleoside
  modified_base 16: mod_base = OTHER; note = 2'-fluoro nucleoside
  modified_base 17: mod_base = OTHER; note = 2'-O-methoxy nucleoside
  modified_base 18: mod_base = OTHER; note = 2'-O-methoxy nucleoside
  modified_base 19: mod_base = OTHER; note = 2'-O-methoxy nucleoside
  modified_base 20: mod_base = OTHER; note = 2'-O-methoxy nucleoside
  modified_base 21: mod_base = OTHER; note = 2'-O-methoxy nucleoside with phosphorothioate bond
  modified_base 22: mod_base = OTHER; note = 2'-O-methoxy nucleoside with phosphorothioate bond
  modified_base 23: mod_base = OTHER; note = 2'-O-methoxy nucleoside
tgtgacacaaagcaggtgctgca

SEQ ID NO: 406 - RNA, 23 nt, synthetic construct
  source 1..23: mol_type = other RNA
  modified_base 1: mod_base = OTHER; note = 2'-O-methoxy nucleoside with phosphorothioate bond
  modified_base 2: mod_base = OTHER; note = 2'-fluoro nucleoside with phosphorothioate bond
  modified_base 3: mod_base = OTHER; note = 2'-fluoro nucleoside
  modified_base 4: mod_base = OTHER; note = 2'-fluoro nucleoside
  modified_base 5: mod_base = OTHER; note = 2'-O-methoxy nucleoside
  modified_base 6: mod_base = OTHER; note = 2'-fluoro nucleoside
  modified_base 7: mod_base = OTHER; note = 2'-O-methoxy nucleoside
  modified_base 8: mod_base = OTHER; note = 2'-O-methoxy nucleoside
  modified_base 9: mod_base = OTHER; note = 2'-O-methoxy nucleoside
  modified_base 10: mod_base = OTHER; note = 2'-O-methoxy nucleoside
  modified_base 11: mod_base = OTHER; note = 2'-O-methoxy nucleoside
  modified_base 12: mod_base = OTHER; note = 2'-O-methoxy nucleoside
  modified_base 13: mod_base = OTHER; note = 2'-O-methoxy nucleoside
  modified_base 14: mod_base = OTHER; note = 2'-fluoro nucleoside
  modified_base 15: mod_base = OTHER; note = 2'-O-methoxy nucleoside
  modified_base 16: mod_base = OTHER; note = 2'-fluoro nucleoside
  modified_base 17: mod_base = OTHER; note = 2'-O-methoxy nucleoside
  modified_base 18: mod_base = OTHER; note = 2'-O-methoxy nucleoside
  modified_base 19: mod_base = OTHER; note = 2'-O-methoxy nucleoside
  modified_base 20: mod_base = OTHER; note = 2'-O-methoxy nucleoside
  modified_base 21: mod_base = OTHER; note = 2'-O-methoxy nucleoside with phosphorothioate bond
  modified_base 22: mod_base = OTHER; note = 2'-O-methoxy nucleoside with phosphorothioate bond
  modified_base 23: mod_base = OTHER; note = 2'-O-methoxy nucleoside
tgtgacacaaagcaggtgctgca

SEQ ID NO: 407 - RNA, 23 nt, synthetic construct
  source 1..23: mol_type = other RNA
  modified_base 1: mod_base = OTHER; note = 2'-O-methoxy nucleoside with phosphorothioate bond
  modified_base 2: mod_base = OTHER; note = 2'-fluoro nucleoside with phosphorothioate bond
  modified_base 3: mod_base = OTHER; note = 2'-O-methoxy nucleoside
  modified_base 4: mod_base = OTHER; note = 2'-fluoro nucleoside
  modified_base 5: mod_base = OTHER; note = 2'-fluoro nucleoside
  modified_base 6: mod_base = OTHER; note = 2'-fluoro nucleoside
  modified_base 7: mod_base = OTHER; note = 2'-O-methoxy nucleoside
  modified_base 8: mod_base = OTHER; note = 2'-O-methoxy nucleoside
  modified_base 9: mod_base = OTHER; note = 2'-O-methoxy nucleoside
  modified_base 10: mod_base = OTHER; note = 2'-O-methoxy nucleoside
  modified_base 11: mod_base = OTHER; note = 2'-O-methoxy nucleoside
  modified_base 12: mod_base = OTHER; note = 2'-O-methoxy nucleoside
  modified_base 13: mod_base = OTHER; note = 2'-O-methoxy nucleoside
  modified_base 14: mod_base = OTHER; note = 2'-fluoro nucleoside
  modified_base 15: mod_base = OTHER; note = 2'-O-methoxy nucleoside
  modified_base 16: mod_base = OTHER; note = 2'-fluoro nucleoside
  modified_base 17: mod_base = OTHER; note = 2'-O-methoxy nucleoside
  modified_base 18: mod_base = OTHER; note = 2'-O-methoxy nucleoside
  modified_base 19: mod_base = OTHER; note = 2'-O-methoxy nucleoside
  modified_base 20: mod_base = OTHER; note = 2'-O-methoxy nucleoside
  modified_base 21: mod_base = OTHER; note = 2'-O-methoxy nucleoside with phosphorothioate bond
  modified_base 22: mod_base = OTHER; note = 2'-O-methoxy nucleoside with phosphorothioate bond
  modified_base 23: mod_base = OTHER; note = 2'-O-methoxy nucleoside
tgtgacacaaagcaggtgctgca

SEQ ID NO: 408 - RNA, 23 nt, synthetic construct
  source 1..23: mol_type = other RNA
  modified_base 1: mod_base = OTHER; note = 2'-O-methoxy nucleoside with phosphorothioate bond
  modified_base 2: mod_base = OTHER; note = 2'-fluoro nucleoside with phosphorothioate bond
  modified_base 3: mod_base = OTHER; note = 2'-O-methoxy nucleoside
  modified_base 4: mod_base = OTHER; note = 2'-O-methoxy nucleoside
  modified_base 5: mod_base = OTHER; note = 2'-O-methoxy nucleoside
  modified_base 6: mod_base = OTHER; note = 2'-fluoro nucleoside
  modified_base 7: mod_base = OTHER; note = 2'-O-methoxy nucleoside
  modified_base 8: mod_base = OTHER; note = 2'-O-methoxy nucleoside
  modified_base 9: mod_base = OTHER; note = 2'-O-methoxy nucleoside
  modified_base 10: mod_base = OTHER; note = 2'-O-methoxy nucleoside
  modified_base 11: mod_base = OTHER; note = 2'-O-methoxy nucleoside
  modified_base 12: mod_base = OTHER; note = 2'-O-methoxy nucleoside
  modified_base 13: mod_base = OTHER; note = 2'-O-methoxy nucleoside
  modified_base 14: mod_base = OTHER; note = 2'-fluoro nucleoside
  modified_base 15: mod_base = OTHER; note = 2'-O-methoxy nucleoside
  modified_base 16: mod_base = OTHER; note = 2'-fluoro nucleoside
  modified_base 17: mod_base = OTHER; note = 2'-O-methoxy nucleoside
  modified_base 18: mod_base = OTHER; note = 2'-O-methoxy nucleoside
  modified_base 19: mod_base = OTHER; note = 2'-O-methoxy nucleoside
  modified_base 20: mod_base = OTHER; note = 2'-O-methoxy nucleoside
  modified_base 21: mod_base = OTHER; note = 2'-O-methoxy nucleoside with phosphorothioate bond
  modified_base 22: mod_base = OTHER; note = 2'-O-methoxy nucleoside with phosphorothioate bond
  modified_base 23: mod_base = OTHER; note = 2'-O-methoxy nucleoside
cttgactttgcattccagacctg

SEQ ID NO: 409 - RNA, 23 nt, synthetic construct
  source 1..23: mol_type = other RNA
  modified_base 1: mod_base = OTHER; note = 2'-O-methoxy nucleoside with phosphorothioate bond
  modified_base 2: mod_base = OTHER; note = 2'-fluoro nucleoside with phosphorothioate bond
  modified_base 3: mod_base = OTHER; note = 2'-fluoro nucleoside
  modified_base 4: mod_base = OTHER; note = 2'-fluoro nucleoside
  modified_base 5: mod_base = OTHER; note = 2'-O-methoxy nucleoside
  modified_base 6: mod_base = OTHER; note = 2'-fluoro nucleoside
  modified_base 7: mod_base = OTHER; note = 2'-O-methoxy nucleoside
  modified_base 8: mod_base = OTHER; note = 2'-O-methoxy nucleoside
  modified_base 9: mod_base = OTHER; note = 2'-O-methoxy nucleoside
  modified_base 10: mod_base = OTHER; note = 2'-O-methoxy nucleoside
  modified_base 11: mod_base = OTHER; note = 2'-O-methoxy nucleoside
  modified_base 12: mod_base = OTHER; note = 2'-O-methoxy nucleoside
  modified_base 13: mod_base = OTHER; note = 2'-O-methoxy nucleoside
  modified_base 14: mod_base = OTHER; note = 2'-fluoro nucleoside
  modified_base 15: mod_base = OTHER; note = 2'-O-methoxy nucleoside
  modified_base 16: mod_base = OTHER; note = 2'-fluoro nucleoside
  modified_base 17: mod_base = OTHER; note = 2'-O-methoxy nucleoside
  modified_base 18: mod_base = OTHER; note = 2'-O-methoxy nucleoside
  modified_base 19: mod_base = OTHER; note = 2'-O-methoxy nucleoside
  modified_base 20: mod_base = OTHER; note = 2'-O-methoxy nucleoside
  modified_base 21: mod_base = OTHER; note = 2'-O-methoxy nucleoside with phosphorothioate bond
  modified_base 22: mod_base = OTHER; note = 2'-O-methoxy nucleoside with phosphorothioate bond
  modified_base 23: mod_base = OTHER; note = 2'-O-methoxy nucleoside
cttgactttgcattccagacctg

SEQ ID NO: 410 - RNA, 23 nt, synthetic construct
  source 1..23: mol_type = other RNA
  modified_base 1: mod_base = OTHER; note = 2'-O-methoxy nucleoside with phosphorothioate bond
  modified_base 2: mod_base = OTHER; note = 2'-fluoro nucleoside with phosphorothioate bond
  modified_base 3: mod_base = OTHER; note = 2'-O-methoxy nucleoside
  modified_base 4: mod_base = OTHER; note = 2'-fluoro nucleoside
  modified_base 5: mod_base = OTHER; note = 2'-fluoro nucleoside
  modified_base 6: mod_base = OTHER; note = 2'-fluoro nucleoside
  modified_base 7: mod_base = OTHER; note = 2'-O-methoxy nucleoside
  modified_base 8: mod_base = OTHER; note = 2'-O-methoxy nucleoside
  modified_base 9: mod_base = OTHER; note = 2'-O-methoxy nucleoside
  modified_base 10: mod_base = OTHER; note = 2'-O-methoxy nucleoside
  modified_base 11: mod_base = OTHER; note = 2'-O-methoxy nucleoside
  modified_base 12: mod_base = OTHER; note = 2'-O-methoxy nucleoside
  modified_base 13: mod_base = OTHER; note = 2'-O-methoxy nucleoside
  modified_base 14: mod_base = OTHER; note = 2'-fluoro nucleoside
  modified_base 15: mod_base = OTHER; note = 2'-O-methoxy nucleoside
  modified_base 16: mod_base = OTHER; note = 2'-fluoro nucleoside
  modified_base 17: mod_base = OTHER; note = 2'-O-methoxy nucleoside
  modified_base 18: mod_base = OTHER; note = 2'-O-methoxy nucleoside
  modified_base 19: mod_base = OTHER; note = 2'-O-methoxy nucleoside
  modified_base 20: mod_base = OTHER; note = 2'-O-methoxy nucleoside
  modified_base 21: mod_base = OTHER; note = 2'-O-methoxy nucleoside with phosphorothioate bond
  modified_base 22: mod_base = OTHER; note = 2'-O-methoxy nucleoside with phosphorothioate bond
  modified_base 23: mod_base = OTHER; note = 2'-O-methoxy nucleoside
cttgactttgcattccagacctg

SEQ ID NO: 411 - RNA, 23 nt, synthetic construct
  source 1..23: mol_type = other RNA
  modified_base 1: mod_base = OTHER; note = 2'-O-methoxy nucleoside with phosphorothioate bond
  modified_base 2: mod_base = OTHER; note = 2'-fluoro nucleoside with phosphorothioate bond
  modified_base 3: mod_base = OTHER; note = 2'-O-methoxy nucleoside
  modified_base 4: mod_base = OTHER; note = 2'-O-methoxy nucleoside
  modified_base 5: mod_base = OTHER; note = 2'-O-methoxy nucleoside
  modified_base 6: mod_base = OTHER; note = 2'-fluoro nucleoside
  modified_base 7: mod_base = OTHER; note = 2'-O-methoxy nucleoside
  modified_base 8: mod_base = OTHER; note = 2'-O-methoxy nucleoside
  modified_base 9: mod_base = OTHER; note = 2'-O-methoxy nucleoside
  modified_base 10: mod_base = OTHER; note = 2'-O-methoxy nucleoside
  modified_base 11: mod_base = OTHER; note = 2'-O-methoxy nucleoside
  modified_base 12: mod_base = OTHER; note = 2'-O-methoxy nucleoside
  modified_base 13: mod_base = OTHER; note = 2'-O-methoxy nucleoside
  modified_base 14: mod_base = OTHER; note = 2'-fluoro nucleoside
  modified_base 15: mod_base = OTHER; note = 2'-O-methoxy nucleoside
  modified_base 16: mod_base = OTHER; note = 2'-fluoro nucleoside
  modified_base 17: mod_base = OTHER; note = 2'-O-methoxy nucleoside
  modified_base 18: mod_base = OTHER; note = 2'-O-methoxy nucleoside
  modified_base 19: mod_base = OTHER; note = 2'-O-methoxy nucleoside
  modified_base 20: mod_base = OTHER; note = 2'-O-methoxy nucleoside
  modified_base 21: mod_base = OTHER; note = 2'-O-methoxy nucleoside with phosphorothioate bond
  modified_base 22: mod_base = OTHER; note = 2'-O-methoxy nucleoside with phosphorothioate bond
  modified_base 23: mod_base = OTHER; note = 2'-O-methoxy nucleoside
atgccttagaagcatctccgcca

SEQ ID NO: 412 - RNA, 23 nt, synthetic construct
  source 1..23: mol_type = other RNA
  modified_base 1: mod_base = OTHER; note = 2'-O-methoxy nucleoside with phosphorothioate bond
  modified_base 2: mod_base = OTHER; note = 2'-fluoro nucleoside with phosphorothioate bond
  modified_base 3: mod_base = OTHER; note = 2'-fluoro nucleoside
  modified_base 4: mod_base = OTHER; note = 2'-fluoro nucleoside
  modified_base 5: mod_base = OTHER; note = 2'-O-methoxy nucleoside
  modified_base 6: mod_base = OTHER; note = 2'-fluoro nucleoside
  modified_base 7: mod_base = OTHER; note = 2'-O-methoxy nucleoside
  modified_base 8: mod_base = OTHER; note = 2'-O-methoxy nucleoside
  modified_base 9: mod_base = OTHER; note = 2'-O-methoxy nucleoside
  modified_base 10: mod_base = OTHER; note = 2'-O-methoxy nucleoside
  modified_base 11: mod_base = OTHER; note = 2'-O-methoxy nucleoside
  modified_base 12: mod_base = OTHER; note = 2'-O-methoxy nucleoside
  modified_base 13: mod_base = OTHER; note = 2'-O-methoxy nucleoside
  modified_base 14: mod_base = OTHER; note = 2'-fluoro nucleoside
  modified_base 15: mod_base = OTHER; note = 2'-O-methoxy nucleoside
  modified_base 16: mod_base = OTHER; note = 2'-fluoro nucleoside
  modified_base 17: mod_base = OTHER; note = 2'-O-methoxy nucleoside
  modified_base 18: mod_base = OTHER; note = 2'-O-methoxy nucleoside
  modified_base 19: mod_base = OTHER; note = 2'-O-methoxy nucleoside
  modified_base 20: mod_base = OTHER; note = 2'-O-methoxy nucleoside
  modified_base 21: mod_base = OTHER; note = 2'-O-methoxy nucleoside with phosphorothioate bond
  modified_base 22: mod_base = OTHER; note = 2'-O-methoxy nucleoside with phosphorothioate bond
  modified_base 23: mod_base = OTHER; note = 2'-O-methoxy nucleoside
atgccttagaagcatctccgcca

SEQ ID NO: 413 - RNA, 23 nt, synthetic construct
  source 1..23: mol_type = other RNA
  modified_base 1: mod_base = OTHER; note = 2'-O-methoxy nucleoside with phosphorothioate bond
  modified_base 2: mod_base = OTHER; note = 2'-fluoro nucleoside with phosphorothioate bond
  modified_base 3: mod_base = OTHER; note = 2'-O-methoxy nucleoside
  modified_base 4: mod_base = OTHER; note = 2'-fluoro nucleoside
  modified_base 5: mod_base = OTHER; note = 2'-fluoro nucleoside
  modified_base 6: mod_base = OTHER; note = 2'-fluoro nucleoside
  modified_base 7: mod_base = OTHER; note = 2'-O-methoxy nucleoside
  modified_base 8: mod_base = OTHER; note = 2'-O-methoxy nucleoside
  modified_base 9: mod_base = OTHER; note = 2'-O-methoxy nucleoside
  modified_base 10: mod_base = OTHER; note = 2'-O-methoxy nucleoside
  modified_base 11: mod_base = OTHER; note = 2'-O-methoxy nucleoside
  modified_base 12: mod_base = OTHER; note = 2'-O-methoxy nucleoside
  modified_base 13: mod_base = OTHER; note = 2'-O-methoxy nucleoside
  modified_base 14: mod_base = OTHER; note = 2'-fluoro nucleoside
  modified_base 15: mod_base = OTHER; note = 2'-O-methoxy nucleoside
  modified_base 16: mod_base = OTHER; note = 2'-fluoro nucleoside
  modified_base 17: mod_base = OTHER; note = 2'-O-methoxy nucleoside
  modified_base 18: mod_base = OTHER; note = 2'-O-methoxy nucleoside
  modified_base 19: mod_base = OTHER; note = 2'-O-methoxy nucleoside
  modified_base 20: mod_base = OTHER; note = 2'-O-methoxy nucleoside
  modified_base 21: mod_base = OTHER; note = 2'-O-methoxy nucleoside with phosphorothioate bond
  modified_base 22: mod_base = OTHER; note = 2'-O-methoxy nucleoside with phosphorothioate bond
  modified_base 23: mod_base = OTHER; note = 2'-O-methoxy nucleoside
atgccttagaagcatctccgcca

SEQ ID NO: 414 - RNA, 23 nt, synthetic construct
  source 1..23: mol_type = other RNA
  modified_base 1: mod_base = OTHER; note = 2'-O-methoxy nucleoside with phosphorothioate bond
  modified_base 2: mod_base = OTHER; note = 2'-fluoro nucleoside with phosphorothioate bond
  modified_base 3: mod_base = OTHER; note = 2'-O-methoxy nucleoside
  modified_base 4: mod_base = OTHER; note = 2'-O-methoxy nucleoside
  modified_base 5: mod_base = OTHER; note = 2'-O-methoxy nucleoside
  modified_base 6: mod_base = OTHER; note = 2'-fluoro nucleoside
  modified_base 7: mod_base = OTHER; note = 2'-O-methoxy nucleoside
  modified_base 8: mod_base = OTHER; note = 2'-O-methoxy nucleoside
  modified_base 9: mod_base = OTHER; note = 2'-O-methoxy nucleoside
  modified_base 10: mod_base = OTHER; note = 2'-O-methoxy nucleoside
  modified_base 11: mod_base = OTHER; note = 2'-O-methoxy nucleoside
  modified_base 12: mod_base = OTHER; note = 2'-O-methoxy nucleoside
  modified_base 13: mod_base = OTHER; note = 2'-O-methoxy nucleoside
  modified_base 14: mod_base = OTHER; note = 2'-fluoro nucleoside
  modified_base 15: mod_base = OTHER; note = 2'-O-methoxy nucleoside
  modified_base 16: mod_base = OTHER; note = 2'-fluoro nucleoside
  modified_base 17: mod_base = OTHER; note = 2'-O-methoxy nucleoside
  modified_base 18: mod_base = OTHER; note = 2'-O-methoxy nucleoside
  modified_base 19: mod_base = OTHER; note = 2'-O-methoxy nucleoside
  modified_base 20: mod_base = OTHER; note = 2'-O-methoxy nucleoside
  modified_base 21: mod_base = OTHER; note = 2'-O-methoxy nucleoside with phosphorothioate bond
  modified_base 22: mod_base = OTHER; note = 2'-O-methoxy nucleoside with phosphorothioate bond
  modified_base 23: mod_base = OTHER; note = 2'-O-methoxy nucleoside
aataaaaatgctacaaaacccag

SEQ ID NO: 415 - RNA, 23 nt, synthetic construct
  source 1..23: mol_type = other RNA
  modified_base 1: mod_base = OTHER; note = 2'-O-methoxy nucleoside with phosphorothioate bond
  modified_base 2: mod_base = OTHER; note = 2'-fluoro nucleoside with phosphorothioate bond
  modified_base 3: mod_base = OTHER; note = 2'-fluoro nucleoside
  modified_base 4: mod_base = OTHER; note = 2'-fluoro nucleoside
  modified_base 5: mod_base = OTHER; note = 2'-O-methoxy nucleoside
  modified_base 6: mod_base = OTHER; note = 2'-fluoro nucleoside
  modified_base 7: mod_base = OTHER; note = 2'-O-methoxy nucleoside
  modified_base 8: mod_base = OTHER; note = 2'-O-methoxy nucleoside
  modified_base 9: mod_base = OTHER; note = 2'-O-methoxy nucleoside
  modified_base 10: mod_base = OTHER; note = 2'-O-methoxy nucleoside
  modified_base 11: mod_base = OTHER; note = 2'-O-methoxy nucleoside
  modified_base 12: mod_base = OTHER; note = 2'-O-methoxy nucleoside
  modified_base 13: mod_base = OTHER; note = 2'-O-methoxy nucleoside
  modified_base 14: mod_base = OTHER; note = 2'-fluoro nucleoside
  modified_base 15: mod_base = OTHER; note = 2'-O-methoxy nucleoside
  modified_base 16: mod_base = OTHER; note = 2'-fluoro nucleoside
  modified_base 17: mod_base = OTHER; note = 2'-O-methoxy nucleoside
  modified_base 18: mod_base = OTHER; note = 2'-O-methoxy nucleoside
  modified_base 19: mod_base = OTHER; note = 2'-O-methoxy nucleoside
  modified_base 20: mod_base = OTHER; note = 2'-O-methoxy nucleoside
  modified_base 21: mod_base = OTHER; note = 2'-O-methoxy nucleoside with phosphorothioate bond
  modified_base 22: mod_base = OTHER; note = 2'-O-methoxy nucleoside with phosphorothioate bond
  modified_base 23: mod_base = OTHER; note = 2'-O-methoxy nucleoside
aataaaaatgctacaaaacccag

SEQ ID NO: 416 - RNA, 23 nt, synthetic construct
  source 1..23: mol_type = other RNA
  modified_base 1: mod_base = OTHER; note = 2'-O-methoxy nucleoside with phosphorothioate bond
  modified_base 2: mod_base = OTHER; note = 2'-fluoro nucleoside with phosphorothioate bond
  modified_base 3: mod_base = OTHER; note = 2'-O-methoxy nucleoside
  modified_base 4: mod_base = OTHER; note = 2'-fluoro nucleoside
  modified_base 5: mod_base = OTHER; note = 2'-fluoro nucleoside
  modified_base 6: mod_base = OTHER; note = 2'-fluoro nucleoside
  modified_base 7: mod_base = OTHER; note = 2'-O-methoxy nucleoside
  modified_base 8: mod_base = OTHER; note = 2'-O-methoxy nucleoside
  modified_base 9: mod_base = OTHER; note = 2'-O-methoxy nucleoside
  modified_base 10: mod_base = OTHER; note = 2'-O-methoxy nucleoside
  modified_base 11: mod_base = OTHER; note = 2'-O-methoxy nucleoside
  modified_base 12: mod_base = OTHER; note = 2'-O-methoxy nucleoside
  modified_base 13: mod_base = OTHER; note = 2'-O-methoxy nucleoside
  modified_base 14: mod_base = OTHER; note = 2'-fluoro nucleoside
  modified_base 15: mod_base = OTHER; note = 2'-O-methoxy nucleoside
  modified_base 16: mod_base = OTHER; note = 2'-fluoro nucleoside
  modified_base 17: mod_base = OTHER; note = 2'-O-methoxy nucleoside
  modified_base 18: mod_base = OTHER; note = 2'-O-methoxy nucleoside
  modified_base 19: mod_base = OTHER; note = 2'-O-methoxy nucleoside
  modified_base 20: mod_base = OTHER; note = 2'-O-methoxy nucleoside
  modified_base 21: mod_base = OTHER; note = 2'-O-methoxy nucleoside with phosphorothioate bond
  modified_base 22: mod_base = OTHER; note = 2'-O-methoxy nucleoside with phosphorothioate bond
  modified_base 23: mod_base = OTHER; note = 2'-O-methoxy nucleoside
aataaaaatgctacaaaacccag

SEQ ID NO: 417 - RNA, 21 nt, synthetic construct
  source 1..21: mol_type = other RNA
atggaagacatgcaggatctt

SEQ ID NO: 418 - RNA, 21 nt, synthetic construct
  source 1..21: mol_type = other RNA
aaacccagaataaatatcttc

SEQ ID NO: 419 - RNA, 21 nt, synthetic construct
  source 1..21: mol_type = other RNA
cttgactttgcattccagacc

SEQ ID NO: 420 - RNA, 23 nt, synthetic construct
  source 1..23: mol_type = other RNA
  modified_base 1: mod_base = OTHER; note = 2'-O-methoxy nucleoside with phosphorothioate bond
  modified_base 2: mod_base = OTHER; note = 2'-fluoro nucleoside with phosphorothioate bond
  modified_base 3: mod_base = OTHER; note = 2'-O-methoxy nucleoside
  modified_base 4: mod_base = OTHER; note = 2'-fluoro nucleoside
  modified_base 5: mod_base = OTHER; note = 2'-O-methoxy nucleoside
  modified_base 6: mod_base = OTHER; note = 2'-fluoro nucleoside
  modified_base 7: mod_base = OTHER; note = 2,3-dihydroxypropyl nucleoside
  modified_base 8: mod_base = OTHER; note = 2'-fluoro nucleoside
  modified_base 9: mod_base = OTHER; note = 2'-O-methoxy nucleoside
  modified_base 10: mod_base = OTHER; note = 2'-fluoro nucleoside
  modified_base 11: mod_base = OTHER; note = 2'-O-methoxy nucleoside
  modified_base 12: mod_base = OTHER; note = 2'-fluoro nucleoside
  modified_base 13: mod_base = OTHER; note = 2'-O-methoxy nucleoside
  modified_base 14: mod_base = OTHER; note = 2'-fluoro nucleoside
  modified_base 15: mod_base = OTHER; note = 2'-O-methoxy nucleoside
  modified_base 16: mod_base = OTHER; note = 2'-fluoro nucleoside
  modified_base 17: mod_base = OTHER; note = 2'-O-methoxy nucleoside
  modified_base 18: mod_base = OTHER; note = 2'-fluoro nucleoside
  modified_base 19: mod_base = OTHER; note = 2'-O-methoxy nucleoside
  modified_base 20: mod_base = OTHER; note = 2'-fluoro nucleoside
  modified_base 21: mod_base = OTHER; note = 2'-O-methoxy nucleoside with phosphorothioate bond
  modified_base 22: mod_base = OTHER; note = 2'-fluoro nucleoside with phosphorothioate bond
  modified_base 23: mod_base = OTHER; note = 2'-O-methoxy nucleoside
aagacatgcaggatcttggtgag

SEQ ID NO: 421 - RNA, 23 nt, synthetic construct
  source 1..23: mol_type = other RNA
  modified_base 1: mod_base = OTHER; note = 2'-O-methoxy nucleoside with phosphorothioate bond
  modified_base 2: mod_base = OTHER; note = 2'-fluoro nucleoside with phosphorothioate bond
  modified_base 3: mod_base = OTHER; note = 2'-O-methoxy nucleoside
  modified_base 4: mod_base = OTHER; note = 2'-fluoro nucleoside
  modified_base 5: mod_base = OTHER; note = 2'-O-methoxy nucleoside
  modified_base 6: mod_base = OTHER; note = 2'-fluoro nucleoside
  modified_base 7: mod_base = OTHER; note = 2,3-dihydroxypropyl nucleoside
  modified_base 8: mod_base = OTHER; note = 2'-fluoro nucleoside
  modified_base 9: mod_base = OTHER; note = 2'-O-methoxy nucleoside
  modified_base 10: mod_base = OTHER; note = 2'-fluoro nucleoside
  modified_base 11: mod_base = OTHER; note = 2'-O-methoxy nucleoside
  modified_base 12: mod_base = OTHER; note = 2'-fluoro nucleoside
  modified_base 13: mod_base = OTHER; note = 2'-O-methoxy nucleoside
  modified_base 14: mod_base = OTHER; note = 2'-fluoro nucleoside
  modified_base 15: mod_base = OTHER; note = 2'-O-methoxy nucleoside
  modified_base 16: mod_base = OTHER; note = 2'-fluoro nucleoside
  modified_base 17: mod_base = OTHER; note = 2'-O-methoxy nucleoside
  modified_base 18: mod_base = OTHER; note = 2'-fluoro nucleoside
  modified_base 19: mod_base = OTHER; note = 2'-O-methoxy nucleoside
  modified_base 20: mod_base = OTHER; note = 2'-fluoro nucleoside
  modified_base 21: mod_base = OTHER; note = 2'-O-methoxy nucleoside with phosphorothioate bond
  modified_base 22: mod_base = OTHER; note = 2'-fluoro nucleoside with phosphorothioate bond
  modified_base 23: mod_base = OTHER; note = 2'-O-methoxy nucleoside
aataaactccaggcctatgaggg

SEQ ID NO: 422 - RNA, 23 nt, synthetic construct
  source 1..23: mol_type = other RNA
  modified_base 1: mod_base = OTHER; note = 2'-O-methoxy nucleoside with phosphorothioate bond
  modified_base 2: mod_base = OTHER; note = 2'-fluoro nucleoside with phosphorothioate bond
  modified_base 3: mod_base = OTHER; note = 2'-O-methoxy nucleoside
  modified_base 4: mod_base = OTHER; note = 2'-fluoro nucleoside
  modified_base 5: mod_base = OTHER; note = 2'-O-methoxy nucleoside
  modified_base 6: mod_base = OTHER; note = 2'-fluoro nucleoside
  modified_base 7: mod_base = OTHER; note = 2,3-dihydroxypropyl nucleoside
  modified_base 8: mod_base = OTHER; note = 2'-fluoro nucleoside
  modified_base 9: mod_base = OTHER; note = 2'-O-methoxy nucleoside
  modified_base 10: mod_base = OTHER; note = 2'-fluoro nucleoside
  modified_base 11: mod_base = OTHER; note = 2'-O-methoxy nucleoside
  modified_base 12: mod_base = OTHER; note = 2'-fluoro nucleoside
  modified_base 13: mod_base = OTHER; note = 2'-O-methoxy nucleoside
  modified_base 14: mod_base = OTHER; note = 2'-fluoro nucleoside
  modified_base 15: mod_base = OTHER; note = 2'-O-methoxy nucleoside
  modified_base 16: mod_base = OTHER; note = 2'-fluoro nucleoside
  modified_base 17: mod_base = OTHER; note = 2'-O-methoxy nucleoside
  modified_base 18: mod_base = OTHER; note = 2'-fluoro nucleoside
  modified_base 19: mod_base = OTHER; note = 2'-O-methoxy nucleoside
  modified_base 20: mod_base = OTHER; note = 2'-fluoro nucleoside
  modified_base 21: mod_base = OTHER; note = 2'-O-methoxy nucleoside with phosphorothioate bond
  modified_base 22: mod_base = OTHER; note = 2'-fluoro nucleoside with phosphorothioate bond
  modified_base 23: mod_base = OTHER; note = 2'-O-methoxy nucleoside
tttccgaataaactccaggccta

SEQ ID NO: 423 - RNA, 23 nt, synthetic construct
  source 1..23: mol_type = other RNA
  modified_base 1: mod_base = OTHER; note = 2'-O-methoxy nucleoside with phosphorothioate bond
  modified_base 2: mod_base = OTHER; note = 2'-fluoro nucleoside with phosphorothioate bond
  modified_base 3: mod_base = OTHER; note = 2'-O-methoxy nucleoside
  modified_base 4: mod_base = OTHER; note = 2'-fluoro nucleoside
  modified_base 5: mod_base = OTHER; note = 2'-O-methoxy nucleoside
  modified_base 6: mod_base = OTHER; note = 2'-fluoro nucleoside
  modified_base 7: mod_base = OTHER; note = 2,3-dihydroxypropyl nucleoside
  modified_base 8: mod_base = OTHER; note = 2'-fluoro nucleoside
  modified_base 9: mod_base = OTHER; note = 2'-O-methoxy nucleoside
  modified_base 10: mod_base = OTHER; note = 2'-fluoro nucleoside
  modified_base 11: mod_base = OTHER; note = 2'-O-methoxy nucleoside
  modified_base 12: mod_base = OTHER; note = 2'-fluoro nucleoside
  modified_base 13: mod_base = OTHER; note = 2'-O-methoxy nucleoside
  modified_base 14: mod_base = OTHER; note = 2'-fluoro nucleoside
  modified_base 15: mod_base = OTHER; note = 2'-O-methoxy nucleoside
  modified_base 16: mod_base = OTHER; note = 2'-fluoro nucleoside
  modified_base 17: mod_base = OTHER; note = 2'-O-methoxy nucleoside
  modified_base 18: mod_base = OTHER; note = 2'-fluoro nucleoside
  modified_base 19: mod_base = OTHER; note = 2'-O-methoxy nucleoside
  modified_base 20: mod_base = OTHER; note = 2'-fluoro nucleoside
  modified_base 21: mod_base = OTHER; note = 2'-O-methoxy nucleoside with phosphorothioate bond
  modified_base 22: mod_base = OTHER; note = 2'-fluoro nucleoside with phosphorothioate bond
  modified_base 23: mod_base = OTHER; note = 2'-O-methoxy nucleoside
tgtgacacaaagcaggtgctgca

SEQ ID NO: 424 - RNA, 23 nt, synthetic construct
  source 1..23: mol_type = other RNA
  modified_base 1: mod_base = OTHER; note = 2'-O-methoxy nucleoside with phosphorothioate bond
  modified_base 2: mod_base = OTHER; note = 2'-fluoro nucleoside with phosphorothioate bond
  modified_base 3: mod_base = OTHER; note = 2'-O-methoxy nucleoside
  modified_base 4: mod_base = OTHER; note = 2'-fluoro nucleoside
  modified_base 5: mod_base = OTHER; note = 2'-O-methoxy nucleoside
  modified_base 6: mod_base = OTHER; note = 2'-fluoro nucleoside
  modified_base 7: mod_base = OTHER; note = 2,3-dihydroxypropyl nucleoside
  modified_base 8: mod_base = OTHER; note = 2'-fluoro nucleoside
  modified_base 9: mod_base = OTHER; note = 2'-O-methoxy nucleoside
  modified_base 10: mod_base = OTHER; note = 2'-fluoro nucleoside
  modified_base 11: mod_base = OTHER; note = 2'-O-methoxy nucleoside
  modified_base 12: mod_base = OTHER; note = 2'-fluoro nucleoside
  modified_base 13: mod_base = OTHER; note = 2'-O-methoxy nucleoside
  modified_base 14: mod_base = OTHER; note = 2'-fluoro nucleoside
  modified_base 15: mod_base = OTHER; note = 2'-O-methoxy nucleoside
  modified_base 16: mod_base = OTHER; note = 2'-fluoro nucleoside
  modified_base 17: mod_base = OTHER; note = 2'-O-methoxy nucleoside
  modified_base 18: mod_base = OTHER; note = 2'-fluoro nucleoside
  modified_base 19: mod_base = OTHER; note = 2'-O-methoxy nucleoside
  modified_base 20: mod_base = OTHER; note = 2'-fluoro nucleoside
  modified_base 21: mod_base = OTHER; note = 2'-O-methoxy nucleoside with phosphorothioate bond
  modified_base 22: mod_base = OTHER; note = 2'-fluoro nucleoside with phosphorothioate bond
  modified_base 23: mod_base = OTHER; note = 2'-O-methoxy nucleoside
cttgactttgcattccagacctg

SEQ ID NO: 425 - RNA, 23 nt, synthetic construct
  source 1..23: mol_type = other RNA
  modified_base 1: mod_base = OTHER; note = 2'-O-methoxy nucleoside with phosphorothioate bond
  modified_base 2: mod_base = OTHER; note = 2'-fluoro nucleoside with phosphorothioate bond
  modified_base 3: mod_base = OTHER; note = 2'-O-methoxy nucleoside
  modified_base 4: mod_base = OTHER; note = 2'-fluoro nucleoside
  modified_base 5: mod_base = OTHER; note = 2'-O-methoxy nucleoside
  modified_base 6: mod_base = OTHER; note = 2'-fluoro nucleoside
  modified_base 7: mod_base = OTHER; note = 2,3-dihydroxypropyl nucleoside
  modified_base 8: mod_base = OTHER; note = 2'-fluoro nucleoside
  modified_base 9: mod_base = OTHER; note = 2'-O-methoxy nucleoside
  modified_base 10: mod_base = OTHER; note = 2'-fluoro nucleoside
  modified_base 11: mod_base = OTHER; note = 2'-O-methoxy nucleoside
  modified_base 12: mod_base = OTHER; note = 2'-fluoro nucleoside
  modified_base 13: mod_base = OTHER; note = 2'-O-methoxy nucleoside
  modified_base 14: mod_base = OTHER; note = 2'-fluoro nucleoside
  modified_base 15: mod_base = OTHER; note = 2'-O-methoxy nucleoside
  modified_base 16: mod_base = OTHER; note = 2'-fluoro nucleoside
  modified_base 17: mod_base = OTHER; note = 2'-O-methoxy nucleoside
  modified_base 18: mod_base = OTHER; note = 2'-fluoro nucleoside
  modified_base 19: mod_base = OTHER; note = 2'-O-methoxy nucleoside
  modified_base 20: mod_base = OTHER; note = 2'-fluoro nucleoside
  modified_base 21: mod_base = OTHER; note = 2'-O-methoxy nucleoside with phosphorothioate bond
  modified_base 22: mod_base = OTHER; note = 2'-fluoro nucleoside with phosphorothioate bond
  modified_base 23: mod_base = OTHER; note = 2'-O-methoxy nucleoside
atgccttagaagcatctccgcca

SEQ ID NO: 426 - RNA, 23 nt, synthetic construct
  source 1..23: mol_type = other RNA
  modified_base 1: mod_base = OTHER; note = 2'-O-methoxy nucleoside with phosphorothioate bond
  modified_base 2: mod_base = OTHER; note = 2'-fluoro nucleoside with phosphorothioate bond
  modified_base 3: mod_base = OTHER; note = 2'-O-methoxy nucleoside
  modified_base 4: mod_base = OTHER; note = 2'-fluoro nucleoside
  modified_base 5: mod_base = OTHER; note = 2'-O-methoxy nucleoside
  modified_base 6: mod_base = OTHER; note = 2'-fluoro nucleoside
  modified_base 7: mod_base = OTHER; note = 2,3-dihydroxypropyl nucleoside
  modified_base 8: mod_base = OTHER; note = 2'-fluoro nucleoside
  modified_base 9: mod_base = OTHER; note = 2'-O-methoxy nucleoside
  modified_base 10: mod_base = OTHER; note = 2'-fluoro nucleoside
  modified_base 11: mod_base = OTHER; note = 2'-O-methoxy nucleoside
  modified_base 12: mod_base = OTHER; note = 2'-fluoro nucleoside
  modified_base 13: mod_base = OTHER; note = 2'-O-methoxy nucleoside
  modified_base 14: mod_base = OTHER; note = 2'-fluoro nucleoside
  modified_base 15: mod_base = OTHER; note = 2'-O-methoxy nucleoside
  modified_base 16: mod_base = OTHER; note = 2'-fluoro nucleoside
  modified_base 17: mod_base = OTHER; note = 2'-O-methoxy nucleoside
  modified_base 18: mod_base = OTHER; note = 2'-fluoro nucleoside
  modified_base 19: mod_base = OTHER; note = 2'-O-methoxy nucleoside
  modified_base 20: mod_base = OTHER; note = 2'-fluoro nucleoside
  modified_base 21: mod_base = OTHER; note = 2'-O-methoxy nucleoside with phosphorothioate bond
  modified_base 22: mod_base = OTHER; note = 2'-fluoro nucleoside with phosphorothioate bond
  modified_base 23: mod_base = OTHER; note = 2'-O-methoxy nucleoside
aataaaaatgctacaaaacccag

SEQ ID NO: 427 - RNA, 23 nt, synthetic construct
  source 1..23: mol_type = other RNA
  modified_base 1: mod_base = OTHER; note = 2'-O-methoxy nucleoside with phosphorothioate bond
  modified_base 2: mod_base = OTHER; note = 2'-fluoro nucleoside with phosphorothioate bond
  modified_base 3: mod_base = OTHER; note = 2'-O-methoxy nucleoside
  modified_base 4: mod_base = OTHER; note = 2'-O-methoxy nucleoside
  modified_base 5: mod_base = OTHER; note = 2'-O-methoxy nucleoside
  modified_base 6: mod_base = OTHER; note = 2'-fluoro nucleoside
  modified_base 7: mod_base = OTHER; note = 2,3-dihydroxypropyl nucleoside
  modified_base 8: mod_base = OTHER; note = 2'-O-methoxy nucleoside
  modified_base 9: mod_base = OTHER; note = 2'-O-methoxy nucleoside
  modified_base 10: mod_base = OTHER; note = 2'-O-methoxy nucleoside
  modified_base 11: mod_base = OTHER; note = 2'-O-methoxy nucleoside
  modified_base 12: mod_base = OTHER; note = 2'-O-methoxy nucleoside
  modified_base 13: mod_base = OTHER; note = 2'-O-methoxy nucleoside
  modified_base 14: mod_base = OTHER; note = 2'-fluoro nucleoside
  modified_base 15: mod_base = OTHER; note = 2'-O-methoxy nucleoside
  modified_base 16: mod_base = OTHER; note = 2'-fluoro nucleoside
  modified_base 17: mod_base = OTHER; note = 2'-O-methoxy nucleoside
  modified_base 18: mod_base = OTHER; note = 2'-O-methoxy nucleoside
  modified_base 19: mod_base = OTHER; note = 2'-O-methoxy nucleoside
  modified_base 20: mod_base = OTHER; note = 2'-O-methoxy nucleoside
  modified_base 21: mod_base = OTHER; note = 2'-O-methoxy nucleoside with phosphorothioate bond
  modified_base 22: mod_base = OTHER; note = 2'-O-methoxy nucleoside with phosphorothioate bond
  modified_base 23: mod_base = OTHER; note = 2'-O-methoxy nucleoside
atggaagacatgcaggatcttgg

SEQ ID NO: 428 - RNA, 23 nt, synthetic construct
  source 1..23: mol_type = other RNA
  modified_base 1: mod_base = OTHER; note = 5'-vinyl-(E)-phosphonate-2'-methoxy nucleoside with phosphorothioate bond
  modified_base 2: mod_base = OTHER; note = 2'-fluoro nucleoside with phosphorothioate bond
  modified_base 3: mod_base = OTHER; note = 2'-O-methoxy nucleoside
  modified_base 4: mod_base = OTHER; note = 2'-O-methoxy nucleoside
  modified_base 5: mod_base = OTHER; note = 2'-O-methoxy nucleoside
  modified_base 6: mod_base = OTHER; note = 2'-fluoro nucleoside
  modified_base 7: mod_base = OTHER; note = 2'-O-methoxy nucleoside
  modified_base 8: mod_base = OTHER; note = 2'-O-methoxy nucleoside
  modified_base 9: mod_base = OTHER; note = 2'-O-methoxy nucleoside
  modified_base 10: mod_base = OTHER; note = 2'-O-methoxy nucleoside
  modified_base 11: mod_base = OTHER; note = 2'-O-methoxy nucleoside
  modified_base 12: mod_base = OTHER; note = 2'-O-methoxy nucleoside
  modified_base 13: mod_base = OTHER; note = 2'-O-methoxy nucleoside
  modified_base 14: mod_base = OTHER; note = 2'-fluoro nucleoside
  modified_base 15: mod_base = OTHER; note = 2'-O-methoxy nucleoside
  modified_base 16: mod_base = OTHER; note = 2'-fluoro nucleoside
  modified_base 17: mod_base = OTHER; note = 2'-O-methoxy nucleoside
  modified_base 18: mod_base = OTHER; note = 2'-O-methoxy nucleoside
  modified_base 19: mod_base = OTHER; note = 2'-O-methoxy nucleoside
  modified_base 20: mod_base = OTHER; note = 2'-O-methoxy nucleoside
  modified_base 21: mod_base = OTHER; note = 2'-O-methoxy nucleoside with phosphorothioate bond
  modified_base 22: mod_base = OTHER; note = 2'-O-methoxy nucleoside with phosphorothioate bond
  modified_base 23: mod_base = OTHER; note = 2'-O-methoxy nucleoside
atggaagacatgcaggatcttgg

SEQ ID NO: 429 - RNA, 23 nt, synthetic construct
  source 1..23: mol_type = other RNA
  modified_base 1: mod_base = OTHER; note = 5'-vinyl-(E)-phosphonate-2'-methoxy nucleoside with phosphorothioate bond
  modified_base 2: mod_base = OTHER; note = 2'-fluoro nucleoside with phosphorothioate bond
  modified_base 3: mod_base = OTHER; note = 2'-O-methoxy nucleoside
  modified_base 4: mod_base = OTHER; note = 2'-O-methoxy nucleoside
  modified_base 5: mod_base = OTHER; note = 2'-O-methoxy nucleoside
  modified_base 6: mod_base = OTHER; note = 2'-fluoro nucleoside
  modified_base 7: mod_base = OTHER; note = 2,3-dihydroxypropyl nucleoside
  modified_base 8: mod_base = OTHER; note = 2'-O-methoxy nucleoside
  modified_base 9: mod_base = OTHER; note = 2'-O-methoxy nucleoside
  modified_base 10: mod_base = OTHER; note = 2'-O-methoxy nucleoside
  modified_base 11: mod_base = OTHER; note = 2'-O-methoxy nucleoside
  modified_base 12: mod_base = OTHER; note = 2'-O-methoxy nucleoside
  modified_base 13: mod_base = OTHER; note = 2'-O-methoxy nucleoside
  modified_base 14: mod_base = OTHER; note = 2'-fluoro nucleoside
  modified_base 15: mod_base = OTHER; note = 2'-O-methoxy nucleoside
  modified_base 16: mod_base = OTHER; note = 2'-fluoro nucleoside
  modified_base 17: mod_base = OTHER; note = 2'-O-methoxy nucleoside
  modified_base 18: mod_base = OTHER; note = 2'-O-methoxy nucleoside
  modified_base 19: mod_base = OTHER; note = 2'-O-methoxy nucleoside
  modified_base 20: mod_base = OTHER; note = 2'-O-methoxy nucleoside
  modified_base 21: mod_base = OTHER; note = 2'-O-methoxy nucleoside with phosphorothioate bond
  modified_base 22: mod_base = OTHER; note = 2'-O-methoxy nucleoside with phosphorothioate bond
  modified_base 23: mod_base = OTHER; note = 2'-O-methoxy nucleoside
atggaagacatgcaggatcttgg

SEQ ID NO: 430 - RNA, 23 nt, synthetic construct
  source 1..23: mol_type = other RNA
  modified_base 1: mod_base = OTHER; note = 2'-O-methoxy nucleoside with phosphorothioate bond
  modified_base 2: mod_base = OTHER; note = 2'-fluoro nucleoside with phosphorothioate bond
  modified_base 3: mod_base = OTHER; note = 2'-fluoro nucleoside
  modified_base 4: mod_base = OTHER; note = 2'-fluoro nucleoside
  modified_base 5: mod_base = OTHER; note = 2'-O-methoxy nucleoside
  modified_base 6: mod_base = OTHER; note = 2'-fluoro nucleoside
  modified_base 7: mod_base = OTHER; note = 2,3-dihydroxypropyl nucleoside
  modified_base 8: mod_base = OTHER; note = 2'-O-methoxy nucleoside
  modified_base 9: mod_base = OTHER; note = 2'-O-methoxy nucleoside
  modified_base 10: mod_base = OTHER; note = 2'-O-methoxy nucleoside
  modified_base 11: mod_base = OTHER; note = 2'-O-methoxy nucleoside
  modified_base 12: mod_base = OTHER; note = 2'-O-methoxy nucleoside
  modified_base 13: mod_base = OTHER; note = 2'-O-methoxy nucleoside
  modified_base 14: mod_base = OTHER; note = 2'-fluoro nucleoside
  modified_base 15: mod_base = OTHER; note = 2'-O-methoxy nucleoside
  modified_base 16: mod_base = OTHER; note = 2'-fluoro nucleoside
  modified_base 17: mod_base = OTHER; note = 2'-O-methoxy nucleoside
  modified_base 18: mod_base = OTHER; note = 2'-O-methoxy nucleoside
  modified_base 19: mod_base = OTHER; note = 2'-O-methoxy nucleoside
  modified_base 20: mod_base = OTHER; note = 2'-O-methoxy nucleoside
  modified_base 21: mod_base = OTHER; note = 2'-O-methoxy nucleoside with phosphorothioate bond
  modified_base 22: mod_base = OTHER; note = 2'-O-methoxy nucleoside with phosphorothioate bond
  modified_base 23: mod_base = OTHER; note = 2'-O-methoxy nucleoside
atccagaaagctaagcctccatt

SEQ ID NO: 431 - RNA, 23 nt, synthetic construct
  source 1..23: mol_type = other RNA
  modified_base 1: mod_base = OTHER; note = 5'-vinyl-(E)-phosphonate-2'-methoxy nucleoside with phosphorothioate bond
  modified_base 2: mod_base = OTHER; note = 2'-fluoro nucleoside with phosphorothioate bond
  modified_base 3: mod_base = OTHER; note = 2'-fluoro nucleoside
  modified_base 4: mod_base = OTHER; note = 2'-fluoro nucleoside
  modified_base 5: mod_base = OTHER; note = 2'-O-methoxy nucleoside
  modified_base 6: mod_base = OTHER; note = 2'-fluoro nucleoside
  modified_base 7: mod_base = OTHER; note = 2'-O-methoxy nucleoside
  modified_base 8: mod_base = OTHER; note = 2'-O-methoxy nucleoside
  modified_base 9: mod_base = OTHER; note = 2'-O-methoxy nucleoside
  modified_base 10: mod_base = OTHER; note = 2'-O-methoxy nucleoside
  modified_base 11: mod_base = OTHER; note = 2'-O-methoxy nucleoside
  modified_base 12: mod_base = OTHER; note = 2'-O-methoxy nucleoside
  modified_base 13: mod_base = OTHER; note = 2'-O-methoxy nucleoside
  modified_base 14: mod_base = OTHER; note = 2'-fluoro nucleoside
  modified_base 15: mod_base = OTHER; note = 2'-O-methoxy nucleoside
  modified_base 16: mod_base = OTHER; note = 2'-fluoro nucleoside
  modified_base 17: mod_base = OTHER; note = 2'-O-methoxy nucleoside
  modified_base 18: mod_base = OTHER; note = 2'-O-methoxy nucleoside
  modified_base 19: mod_base = OTHER; note = 2'-O-methoxy nucleoside
  modified_base 20: mod_base = OTHER; note = 2'-O-methoxy nucleoside
  modified_base 21: mod_base = OTHER; note = 2'-O-methoxy nucleoside with phosphorothioate bond
  modified_base 22: mod_base = OTHER; note = 2'-O-methoxy nucleoside with phosphorothioate bond
  modified_base 23: mod_base = OTHER; note = 2'-O-methoxy nucleoside
atccagaaagctaagcctccatt

SEQ ID NO: 432 - RNA, 23 nt, synthetic construct
  source 1..23: mol_type = other RNA
  modified_base 1: mod_base = OTHER; note = 5'-vinyl-(E)-phosphonate-2'-methoxy nucleoside with phosphorothioate bond
  modified_base 2: mod_base = OTHER; note = 2'-fluoro nucleoside with phosphorothioate bond
  modified_base 3: mod_base = OTHER; note = 2'-fluoro nucleoside
  modified_base 4: mod_base = OTHER; note = 2'-fluoro nucleoside
  modified_base 5: mod_base = OTHER; note = 2'-O-methoxy nucleoside
  modified_base 6: mod_base = OTHER; note = 2'-fluoro nucleoside
  modified_base 7: mod_base = OTHER; note = 2,3-dihydroxypropyl nucleoside
  modified_base 8: mod_base = OTHER; note = 2'-O-methoxy nucleoside
  modified_base 9: mod_base = OTHER; note = 2'-O-methoxy nucleoside
  modified_base 10: mod_base = OTHER; note = 2'-O-methoxy nucleoside
  modified_base 11: mod_base = OTHER; note = 2'-O-methoxy nucleoside
  modified_base 12: mod_base = OTHER; note = 2'-O-methoxy nucleoside
  modified_base 13: mod_base = OTHER; note = 2'-O-methoxy nucleoside
  modified_base 14: mod_base = OTHER; note = 2'-fluoro nucleoside
  modified_base 15: mod_base = OTHER; note = 2'-O-methoxy nucleoside
  modified_base 16: mod_base = OTHER; note = 2'-fluoro nucleoside
  modified_base 17: mod_base = OTHER; note = 2'-O-methoxy nucleoside
  modified_base 18: mod_base = OTHER; note = 2'-O-methoxy nucleoside
  modified_base 19: mod_base = OTHER; note = 2'-O-methoxy nucleoside
  modified_base 20: mod_base = OTHER; note = 2'-O-methoxy nucleoside
  modified_base 21: mod_base = OTHER; note = 2'-O-methoxy nucleoside with phosphorothioate bond
  modified_base 22: mod_base = OTHER; note = 2'-O-methoxy nucleoside with phosphorothioate bond
  modified_base 23: mod_base = OTHER; note = 2'-O-methoxy nucleoside
atccagaaagctaagcctccatt

SEQ ID NO: 433 - RNA, 23 nt, synthetic construct
  source 1..23: mol_type = other RNA
  modified_base 1: mod_base = OTHER; note = 2'-O-methoxy nucleoside with phosphorothioate bond
  modified_base 2: mod_base = OTHER; note = 2'-fluoro nucleoside with phosphorothioate bond
  modified_base 3: mod_base = OTHER; note = 2'-O-methoxy nucleoside
  modified_base 4: mod_base = OTHER; note = 2'-O-methoxy nucleoside
  modified_base 5: mod_base = OTHER; note = 2'-O-methoxy nucleoside
  modified_base 6: mod_base = OTHER; note = 2'-fluoro nucleoside
  modified_base 7: mod_base = OTHER; note = 2,3-dihydroxypropyl nucleoside
  modified_base 8: mod_base = OTHER; note = 2'-O-methoxy nucleoside
  modified_base 9: mod_base = OTHER; note = 2'-O-methoxy nucleoside
  modified_base 10: mod_base = OTHER; note = 2'-O-methoxy nucleoside
  modified_base 11: mod_base = OTHER; note = 2'-O-methoxy nucleoside
  modified_base 12: mod_base = OTHER; note = 2'-O-methoxy nucleoside
  modified_base 13: mod_base = OTHER; note = 2'-O-methoxy nucleoside
  modified_base 14: mod_base = OTHER; note = 2'-fluoro nucleoside
  modified_base 15: mod_base = OTHER; note = 2'-O-methoxy nucleoside
  modified_base 16: mod_base = OTHER; note = 2'-fluoro nucleoside
  modified_base 17: mod_base = OTHER; note = 2'-O-methoxy nucleoside
  modified_base 18: mod_base = OTHER; note = 2'-O-methoxy nucleoside
  modified_base 19: mod_base = OTHER; note = 2'-O-methoxy nucleoside
  modified_base 20: mod_base = OTHER; note = 2'-O-methoxy nucleoside
  modified_base 21: mod_base = OTHER; note = 2'-O-methoxy nucleoside with phosphorothioate bond
  modified_base 22: mod_base = OTHER; note = 2'-O-methoxy nucleoside with phosphorothioate bond
  modified_base 23: mod_base = OTHER; note = 2'-O-methoxy nucleoside
aatatcttcaagttacaaaagca

SEQ ID NO: 434 - RNA, 23 nt, synthetic construct
  source 1..23: mol_type = other RNA
  modified_base 1: mod_base = OTHER; note = 5'-vinyl-(E)-phosphonate-2'-methoxy nucleoside with phosphorothioate bond
  modified_base 2: mod_base = OTHER; note = 2'-fluoro nucleoside with phosphorothioate bond
  modified_base 3: mod_base = OTHER; note = 2'-O-methoxy nucleoside
  modified_base 4: mod_base = OTHER; note = 2'-O-methoxy nucleoside
  modified_base 5: mod_base = OTHER; note = 2'-O-methoxy nucleoside
  modified_base 6: mod_base = OTHER; note = 2'-fluoro nucleoside
  modified_base 7: mod_base = OTHER; note = 2'-O-methoxy nucleoside
  modified_base 8: mod_base = OTHER; note = 2'-O-methoxy nucleoside
  modified_base 9: mod_base = OTHER; note = 2'-O-methoxy nucleoside
  modified_base 10: mod_base = OTHER; note = 2'-O-methoxy nucleoside
  modified_base 11: mod_base = OTHER; note = 2'-O-methoxy nucleoside
  modified_base 12: mod_base = OTHER; note = 2'-O-methoxy nucleoside
  modified_base 13: mod_base = OTHER; note = 2'-O-methoxy nucleoside
  modified_base 14: mod_base = OTHER; note = 2'-fluoro nucleoside
  modified_base 15: mod_base = OTHER; note = 2'-O-methoxy nucleoside
  modified_base 16: mod_base = OTHER; note = 2'-fluoro nucleoside
  modified_base 17: mod_base = OTHER; note = 2'-O-methoxy nucleoside
  modified_base 18: mod_base = OTHER; note = 2'-O-methoxy nucleoside
  modified_base 19: mod_base = OTHER; note = 2'-O-methoxy nucleoside
  modified_base 20: mod_base = OTHER; note = 2'-O-methoxy nucleoside
  modified_base 21: mod_base = OTHER; note = 2'-O-methoxy nucleoside with phosphorothioate bond
  modified_base 22: mod_base = OTHER; note = 2'-O-methoxy nucleoside with phosphorothioate bond
  modified_base 23: mod_base = OTHER; note = 2'-O-methoxy nucleoside
aatatcttcaagttacaaaagca

SEQ ID NO: 435 - RNA, 23 nt, synthetic construct
  source 1..23: mol_type = other RNA
  modified_base 1: mod_base = OTHER; note = 5'-vinyl-(E)-phosphonate-2'-methoxy nucleoside with phosphorothioate bond
  modified_base 2: mod_base = OTHER; note = 2'-fluoro nucleoside with phosphorothioate bond
  modified_base 3: mod_base = OTHER; note = 2'-O-methoxy nucleoside
  modified_base 4: mod_base = OTHER; note = 2'-O-methoxy nucleoside
  modified_base 5: mod_base = OTHER; note = 2'-O-methoxy nucleoside
  modified_base 6: mod_base = OTHER; note = 2'-fluoro nucleoside
  modified_base 7: mod_base = OTHER; note = 2,3-dihydroxypropyl nucleoside
  modified_base 8: mod_base = OTHER; note = 2'-O-methoxy nucleoside
  modified_base 9: mod_base = OTHER; note = 2'-O-methoxy nucleoside
  modified_base 10: mod_base = OTHER; note = 2'-O-methoxy nucleoside
  modified_base 11: mod_base = OTHER; note = 2'-O-methoxy nucleoside
  modified_base 12: mod_base = OTHER; note = 2'-O-methoxy nucleoside
  modified_base 13: mod_base = OTHER; note = 2'-O-methoxy nucleoside
  modified_base 14: mod_base = OTHER; note = 2'-fluoro nucleoside
  modified_base 15: mod_base = OTHER; note = 2'-O-methoxy nucleoside
  modified_base 16: mod_base = OTHER; note = 2'-fluoro nucleoside
  modified_base 17: mod_base = OTHER; note = 2'-O-methoxy nucleoside
  modified_base 18: mod_base = OTHER; note = 2'-O-methoxy nucleoside
  modified_base 19: mod_base = OTHER; note = 2'-O-methoxy nucleoside
  modified_base 20: mod_base = OTHER; note = 2'-O-methoxy nucleoside
  modified_base 21: mod_base = OTHER; note = 2'-O-methoxy nucleoside with phosphorothioate bond
  modified_base 22: mod_base = OTHER; note = 2'-O-methoxy nucleoside with phosphorothioate bond
  modified_base 23: mod_base = OTHER; note = 2'-O-methoxy nucleoside
aatatcttcaagttacaaaagca

SEQ ID NO: 436 - RNA, 23 nt, synthetic construct
  source 1..23: mol_type = other RNA
  modified_base 1: mod_base = OTHER; note = 2'-O-methoxy nucleoside with phosphorothioate bond
  modified_base 2: mod_base = OTHER; note = 2'-fluoro nucleoside with phosphorothioate bond
  modified_base 3: mod_base = OTHER; note = 2'-O-methoxy nucleoside
  modified_base 4: mod_base = OTHER; note = 2'-fluoro nucleoside
  modified_base 5: mod_base = OTHER; note = 2'-fluoro nucleoside
  modified_base 6: mod_base = OTHER; note = 2'-fluoro nucleoside
  modified_base 7: mod_base = OTHER; note = 2,3-dihydroxypropyl nucleoside
  modified_base 8: mod_base = OTHER; note = 2'-O-methoxy nucleoside
  modified_base 9: mod_base = OTHER; note = 2'-O-methoxy nucleoside
  modified_base 10: mod_base = OTHER; note = 2'-O-methoxy nucleoside
  modified_base 11: mod_base = OTHER; note = 2'-O-methoxy nucleoside
  modified_base 12: mod_base = OTHER; note = 2'-O-methoxy nucleoside
  modified_base 13: mod_base = OTHER; note = 2'-O-methoxy nucleoside
  modified_base 14: mod_base = OTHER; note = 2'-fluoro nucleoside
  modified_base 15: mod_base = OTHER; note = 2'-O-methoxy nucleoside
  modified_base 16: mod_base = OTHER; note = 2'-fluoro nucleoside
  modified_base 17: mod_base = OTHER; note = 2'-O-methoxy nucleoside
  modified_base 18: mod_base = OTHER; note = 2'-O-methoxy nucleoside
  modified_base 19: mod_base = OTHER; note = 2'-O-methoxy nucleoside
  modified_base 20: mod_base = OTHER; note = 2'-O-methoxy nucleoside
  modified_base 21: mod_base = OTHER; note = 2'-O-methoxy nucleoside with phosphorothioate bond
  modified_base 22: mod_base = OTHER; note = 2'-O-methoxy nucleoside with phosphorothioate bond
  modified_base 23: mod_base = OTHER; note = 2'-O-methoxy nucleoside
aatatcttcaagttacaaaagca

SEQ ID NO: 437 - RNA, 23 nt, synthetic construct
  source 1..23: mol_type = other RNA
  modified_base 1: mod_base = OTHER; note = 5'-vinyl-(E)-phosphonate-2'-methoxy nucleoside with phosphorothioate bond
  modified_base 2: mod_base = OTHER; note = 2'-fluoro nucleoside with phosphorothioate bond
  modified_base 3: mod_base = OTHER; note = 2'-O-methoxy nucleoside
  modified_base 4: mod_base = OTHER; note = 2'-fluoro nucleoside
  modified_base 5: mod_base = OTHER; note = 2'-fluoro nucleoside
  modified_base 6: mod_base = OTHER; note = 2'-fluoro nucleoside
  modified_base 7: mod_base = OTHER; note = 2'-O-methoxy nucleoside
  modified_base 8: mod_base = OTHER; note = 2'-O-methoxy nucleoside
  modified_base 9: mod_base = OTHER; note = 2'-O-methoxy nucleoside
  modified_base 10: mod_base = OTHER; note = 2'-O-methoxy nucleoside
  modified_base 11: mod_base = OTHER; note = 2'-O-methoxy nucleoside
  modified_base 12: mod_base = OTHER; note = 2'-O-methoxy nucleoside
  modified_base 13: mod_base = OTHER; note = 2'-O-methoxy nucleoside
  modified_base 14: mod_base = OTHER; note = 2'-fluoro nucleoside
  modified_base 15: mod_base = OTHER; note = 2'-O-methoxy nucleoside
  modified_base 16: mod_base = OTHER; note = 2'-fluoro nucleoside
  modified_base 17: mod_base = OTHER; note = 2'-O-methoxy nucleoside
  modified_base 18: mod_base = OTHER; note = 2'-O-methoxy nucleoside
  modified_base 19: mod_base = OTHER; note = 2'-O-methoxy nucleoside
  modified_base 20: mod_base = OTHER; note = 2'-O-methoxy nucleoside
  modified_base 21: mod_base = OTHER; note = 2'-O-methoxy nucleoside with phosphorothioate bond
  modified_base 22: mod_base = OTHER; note = 2'-O-methoxy nucleoside with phosphorothioate bond
  modified_base 23: mod_base = OTHER; note = 2'-O-methoxy nucleoside
aatatcttcaagttacaaaagca

SEQ ID NO: 438 - RNA, 23 nt, synthetic construct
  source 1..23: mol_type = other RNA
  modified_base 1: mod_base = OTHER; note = 5'-vinyl-(E)-phosphonate-2'-methoxy nucleoside with phosphorothioate bond
  modified_base 2: mod_base = OTHER; note = 2'-fluoro nucleoside with phosphorothioate bond
  modified_base 3: mod_base = OTHER; note = 2'-O-methoxy nucleoside
  modified_base 4: mod_base = OTHER; note = 2'-fluoro nucleoside
  modified_base 5: mod_base = OTHER; note = 2'-fluoro nucleoside
  modified_base 6: mod_base = OTHER; note = 2'-fluoro nucleoside
  modified_base 7: mod_base = OTHER; note = 2,3-dihydroxypropyl nucleoside
  modified_base 8: mod_base = OTHER; note = 2'-O-methoxy nucleoside
  modified_base 9: mod_base = OTHER; note = 2'-O-methoxy nucleoside
  modified_base 10: mod_base = OTHER; note = 2'-O-methoxy nucleoside
  modified_base 11: mod_base = OTHER; note = 2'-O-methoxy nucleoside
  modified_base 12: mod_base = OTHER; note = 2'-O-methoxy nucleoside
  modified_base 13: mod_base = OTHER; note = 2'-O-methoxy nucleoside
  modified_base 14: mod_base = OTHER; note = 2'-fluoro nucleoside
  modified_base 15: mod_base = OTHER; note = 2'-O-methoxy nucleoside
  modified_base 16: mod_base = OTHER; note = 2'-fluoro nucleoside
  modified_base 17: mod_base = OTHER; note = 2'-O-methoxy nucleoside
  modified_base 18: mod_base = OTHER; note = 2'-O-methoxy nucleoside
  modified_base 19: mod_base = OTHER; note = 2'-O-methoxy nucleoside
  modified_base 20: mod_base = OTHER; note = 2'-O-methoxy nucleoside
  modified_base 21: mod_base = OTHER; note = 2'-O-methoxy nucleoside with phosphorothioate bond
  modified_base 22: mod_base = OTHER; note = 2'-O-methoxy nucleoside with phosphorothioate bond
  modified_base 23: mod_base = OTHER; note = 2'-O-methoxy nucleoside
aatatcttcaagttacaaaagca

SEQ ID NO: 439 - RNA, 23 nt, synthetic construct
  source 1..23: mol_type = other RNA
  modified_base 1: mod_base = OTHER; note = 2'-O-methoxy nucleoside with phosphorothioate bond
  modified_base 2: mod_base = OTHER; note = 2'-fluoro nucleoside with phosphorothioate bond
  modified_base 3: mod_base = OTHER; note = 2'-fluoro nucleoside
  modified_base 4: mod_base = OTHER; note = 2'-fluoro nucleoside
  modified_base 5: mod_base = OTHER; note = 2'-O-methoxy nucleoside
  modified_base 6: mod_base = OTHER; note = 2'-fluoro nucleoside
  modified_base 7: mod_base = OTHER; note = 2,3-dihydroxypropyl nucleoside
  modified_base 8: mod_base = OTHER; note = 2'-O-methoxy nucleoside
  modified_base 9: mod_base = OTHER; note = 2'-O-methoxy nucleoside
  modified_base 10: mod_base = OTHER; note = 2'-O-methoxy nucleoside
  modified_base 11: mod_base = OTHER; note = 2'-O-methoxy nucleoside
  modified_base 12: mod_base = OTHER; note = 2'-O-methoxy nucleoside
  modified_base 13: mod_base = OTHER; note = 2'-O-methoxy nucleoside
  modified_base 14: mod_base = OTHER; note = 2'-fluoro nucleoside
  modified_base 15: mod_base = OTHER; note = 2'-O-methoxy nucleoside
  modified_base 16: mod_base = OTHER; note = 2'-fluoro nucleoside
  modified_base 17: mod_base = OTHER; note = 2'-O-methoxy nucleoside
  modified_base 18: mod_base = OTHER; note = 2'-O-methoxy nucleoside
  modified_base 19: mod_base = OTHER; note = 2'-O-methoxy nucleoside
  modified_base 20: mod_base = OTHER; note = 2'-O-methoxy nucleoside
  modified_base 21: mod_base = OTHER; note = 2'-O-methoxy nucleoside with phosphorothioate bond
  modified_base 22: mod_base = OTHER; note = 2'-O-methoxy nucleoside with phosphorothioate bond
  modified_base 23: mod_base = OTHER; note = 2'-O-methoxy nucleoside
aatatcttcaagttacaaaagca

SEQ ID NO: 440 - RNA, 23 nt, synthetic construct
  source 1..23: mol_type = other RNA
  modified_base 1: mod_base = OTHER; note = 5'-vinyl-(E)-phosphonate-2'-methoxy nucleoside with phosphorothioate bond
  modified_base 2: mod_base = OTHER; note = 2'-fluoro nucleoside with phosphorothioate bond
  modified_base 3: mod_base = OTHER; note = 2'-fluoro nucleoside
  modified_base 4: mod_base = OTHER; note = 2'-fluoro nucleoside
  modified_base 5: mod_base = OTHER; note = 2'-O-methoxy nucleoside
  modified_base 6: mod_base = OTHER; note = 2'-fluoro nucleoside
  modified_base 7: mod_base = OTHER; note = 2'-O-methoxy nucleoside
  modified_base 8: mod_base = OTHER; note = 2'-O-methoxy nucleoside
  modified_base 9: mod_base = OTHER; note = 2'-O-methoxy nucleoside
  modified_base 10: mod_base = OTHER; note = 2'-O-methoxy nucleoside
  modified_base 11: mod_base = OTHER; note = 2'-O-methoxy nucleoside
  modified_base 12: mod_base = OTHER; note = 2'-O-methoxy nucleoside
  modified_base 13: mod_base = OTHER; note = 2'-O-methoxy nucleoside
  modified_base 14: mod_base = OTHER; note = 2'-fluoro nucleoside
  modified_base 15: mod_base = OTHER; note = 2'-O-methoxy nucleoside
  modified_base 16: mod_base = OTHER; note = 2'-fluoro nucleoside
  modified_base 17: mod_base = OTHER; note = 2'-O-methoxy nucleoside
  modified_base 18: mod_base = OTHER; note = 2'-O-methoxy nucleoside
  modified_base 19: mod_base = OTHER; note = 2'-O-methoxy nucleoside
  modified_base 20: mod_base = OTHER; note = 2'-O-methoxy nucleoside
  modified_base 21: mod_base = OTHER; note = 2'-O-methoxy nucleoside with phosphorothioate bond
  modified_base 22: mod_base = OTHER; note = 2'-O-methoxy nucleoside with phosphorothioate bond
  modified_base 23: mod_base = OTHER; note = 2'-O-methoxy nucleoside
aatatcttcaagttacaaaagca

SEQ ID NO: 441 - RNA, 23 nt, synthetic construct
  source 1..23: mol_type = other RNA
  modified_base 1: mod_base = OTHER; note = 5'-vinyl-(E)-phosphonate-2'-methoxy nucleoside with phosphorothioate bond
  modified_base 2: mod_base = OTHER; note = 2'-fluoro nucleoside with phosphorothioate bond
  modified_base 3: mod_base = OTHER; note = 2'-fluoro nucleoside
  modified_base 4: mod_base = OTHER; note = 2'-fluoro nucleoside
  modified_base 5: mod_base = OTHER; note = 2'-O-methoxy nucleoside
  modified_base 6: mod_base = OTHER; note = 2'-fluoro nucleoside
  modified_base 7: mod_base = OTHER; note = 2,3-dihydroxypropyl nucleoside
  modified_base 8: mod_base = OTHER; note = 2'-O-methoxy nucleoside
  modified_base 9: mod_base = OTHER; note = 2'-O-methoxy nucleoside
  modified_base 10: mod_base = OTHER; note = 2'-O-methoxy nucleoside
  modified_base 11: mod_base = OTHER; note = 2'-O-methoxy nucleoside
  modified_base 12: mod_base = OTHER; note = 2'-O-methoxy nucleoside
  modified_base 13: mod_base = OTHER; note = 2'-O-methoxy nucleoside
  modified_base 14: mod_base = OTHER; note = 2'-fluoro nucleoside
  modified_base 15: mod_base = OTHER; note = 2'-O-methoxy nucleoside
  modified_base 16: mod_base = OTHER; note = 2'-fluoro nucleoside
  modified_base 17: mod_base = OTHER; note = 2'-O-methoxy nucleoside
  modified_base 18: mod_base = OTHER; note = 2'-O-methoxy nucleoside
  modified_base 19: mod_base = OTHER; note = 2'-O-methoxy nucleoside
  modified_base 20: mod_base = OTHER; note = 2'-O-methoxy nucleoside
  modified_base 21: mod_base = OTHER; note = 2'-O-methoxy nucleoside with phosphorothioate bond
  modified_base 22: mod_base = OTHER; note = 2'-O-methoxy nucleoside with phosphorothioate bond
  modified_base 23: mod_base = OTHER; note = 2'-O-methoxy nucleoside
aatatcttcaagttacaaaagca

SEQ ID NO: 442 - RNA, 23 nt, synthetic construct
  source 1..23: mol_type = other RNA
  modified_base 1: mod_base = OTHER; note = 2'-O-methoxy nucleoside with phosphorothioate bond
  modified_base 2: mod_base = OTHER; note = 2'-fluoro nucleoside with phosphorothioate bond
  modified_base 3: mod_base = OTHER; note = 2'-fluoro nucleoside
  modified_base 4: mod_base = OTHER; note = 2'-fluoro nucleoside
  modified_base 5: mod_base = OTHER; note = 2'-O-methoxy nucleoside
  modified_base 6: mod_base = OTHER; note = 2'-fluoro nucleoside
  modified_base 7: mod_base = OTHER; note = 2,3-dihydroxypropyl nucleoside
  modified_base 8: mod_base = OTHER; note = 2'-O-methoxy nucleoside
  modified_base 9: mod_base = OTHER; note = 2'-O-methoxy nucleoside
  modified_base 10: mod_base = OTHER; note = 2'-O-methoxy nucleoside
  modified_base 11: mod_base = OTHER; note = 2'-O-methoxy nucleoside
  modified_base 12: mod_base = OTHER; note = 2'-O-methoxy nucleoside
  modified_base 13: mod_base = OTHER; note = 2'-O-methoxy nucleoside
  modified_base 14: mod_base = OTHER; note = 2'-fluoro nucleoside
  modified_base 15: mod_base = OTHER; note = 2'-O-methoxy nucleoside
  modified_base 16: mod_base = OTHER; note = 2'-fluoro nucleoside
  modified_base 17: mod_base = OTHER; note = 2'-O-methoxy nucleoside
  modified_base 18: mod_base = OTHER; note = 2'-O-methoxy nucleoside
  modified_base 19: mod_base = OTHER; note = 2'-O-methoxy nucleoside
  modified_base 20: mod_base = OTHER; note = 2'-O-methoxy nucleoside
  modified_base 21: mod_base = OTHER; note = 2'-O-methoxy nucleoside with phosphorothioate bond
  modified_base 22: mod_base = OTHER; note = 2'-O-methoxy nucleoside with phosphorothioate bond
  modified_base 23: mod_base = OTHER; note = 2'-O-methoxy nucleoside
ttaataaaaatgctacaaaaccc

SEQ ID NO: 443 - RNA, 23 nt, synthetic construct
  source 1..23: mol_type = other RNA
  modified_base 1: mod_base = OTHER; note = 5'-vinyl-(E)-phosphonate-2'-methoxy nucleoside with phosphorothioate bond
  modified_base 2: mod_base = OTHER; note = 2'-fluoro nucleoside with phosphorothioate bond
  modified_base 3: mod_base = OTHER; note = 2'-fluoro nucleoside
  modified_base 4: mod_base = OTHER; note = 2'-fluoro nucleoside
  modified_base 5: mod_base = OTHER; note = 2'-O-methoxy nucleoside
  modified_base 6: mod_base = OTHER; note = 2'-fluoro nucleoside
  modified_base 7: mod_base = OTHER; note = 2'-O-methoxy nucleoside
  modified_base 8: mod_base = OTHER; note = 2'-O-methoxy nucleoside
  modified_base 9: mod_base = OTHER; note = 2'-O-methoxy nucleoside
  modified_base 10: mod_base = OTHER; note = 2'-O-methoxy nucleoside
  modified_base 11: mod_base = OTHER; note = 2'-O-methoxy nucleoside
  modified_base 12: mod_base = OTHER; note = 2'-O-methoxy nucleoside
  modified_base 13: mod_base = OTHER; note = 2'-O-methoxy nucleoside
  modified_base 14: mod_base = OTHER; note = 2'-fluoro nucleoside
  modified_base 15: mod_base = OTHER; note = 2'-O-methoxy nucleoside
  modified_base 16: mod_base = OTHER; note = 2'-fluoro nucleoside
  modified_base 17: mod_base = OTHER; note = 2'-O-methoxy nucleoside
  modified_base 18: mod_base = OTHER; note = 2'-O-methoxy nucleoside
  modified_base 19: mod_base = OTHER; note = 2'-O-methoxy nucleoside
  modified_base 20: mod_base = OTHER; note = 2'-O-methoxy nucleoside
  modified_base 21: mod_base = OTHER; note = 2'-O-methoxy nucleoside with phosphorothioate bond
  modified_base 22: mod_base = OTHER; note = 2'-O-methoxy nucleoside with phosphorothioate bond
  modified_base 23: mod_base = OTHER; note = 2'-O-methoxy nucleoside
ttaataaaaatgctacaaaaccc

SEQ ID NO: 444 - RNA, 23 nt, synthetic construct
  source 1..23: mol_type = other RNA
  modified_base 1: mod_base = OTHER; note = 5'-vinyl-(E)-phosphonate-2'-methoxy nucleoside with phosphorothioate bond
  modified_base 2: mod_base = OTHER; note = 2'-fluoro nucleoside with phosphorothioate bond
  modified_base 3: mod_base = OTHER; note = 2'-fluoro nucleoside
  modified_base 4: mod_base = OTHER; note = 2'-fluoro nucleoside
  modified_base 5: mod_base = OTHER; note = 2'-O-methoxy nucleoside
  modified_base 6: mod_base = OTHER; note = 2'-fluoro nucleoside
  modified_base 7: mod_base = OTHER; note = 2,3-dihydroxypropyl nucleoside
  modified_base 8: mod_base = OTHER; note = 2'-O-methoxy nucleoside
  modified_base 9: mod_base = OTHER; note = 2'-O-methoxy nucleoside
  modified_base 10: mod_base = OTHER; note = 2'-O-methoxy nucleoside
  modified_base 11: mod_base = OTHER; note = 2'-O-methoxy nucleoside
  modified_base 12: mod_base = OTHER; note = 2'-O-methoxy nucleoside
  modified_base 13: mod_base = OTHER; note = 2'-O-methoxy nucleoside
  modified_base 14: mod_base = OTHER; note = 2'-fluoro nucleoside
  modified_base 15: mod_base = OTHER; note = 2'-O-methoxy nucleoside
  modified_base 16: mod_base = OTHER; note = 2'-fluoro nucleoside
  modified_base 17: mod_base = OTHER; note = 2'-O-methoxy nucleoside
  modified_base 18: mod_base = OTHER; note = 2'-O-methoxy nucleoside
  modified_base 19: mod_base = OTHER; note = 2'-O-methoxy nucleoside
  modified_base 20: mod_base = OTHER; note = 2'-O-methoxy nucleoside
  modified_base 21: mod_base = OTHER; note = 2'-O-methoxy nucleoside with phosphorothioate bond
  modified_base 22: mod_base = OTHER; note = 2'-O-methoxy nucleoside with phosphorothioate bond
  modified_base 23: mod_base = OTHER; note = 2'-O-methoxy nucleoside
ttaataaaaatgctacaaaaccc

SEQ ID NO: 445 - RNA, 23 nt, synthetic construct
  source 1..23: mol_type = other RNA
  modified_base 1: mod_base = OTHER; note = 2'-O-methoxy nucleoside with phosphorothioate bond
  modified_base 2: mod_base = OTHER; note = 2'-fluoro nucleoside with phosphorothioate bond
  modified_base 3: mod_base = OTHER; note = 2'-O-methoxy nucleoside
  modified_base 4: mod_base = OTHER; note = 2'-fluoro nucleoside
  modified_base 5: mod_base = OTHER; note = 2'-fluoro nucleoside
  modified_base 6: mod_base = OTHER; note = 2'-fluoro nucleoside
  modified_base 7: mod_base = OTHER; note = 2,3-dihydroxypropyl nucleoside
  modified_base 8: mod_base = OTHER; note = 2'-O-methoxy nucleoside
  modified_base 9: mod_base = OTHER; note = 2'-O-methoxy nucleoside
  modified_base 10: mod_base = OTHER; note = 2'-O-methoxy nucleoside
  modified_base 11: mod_base = OTHER; note = 2'-O-methoxy nucleoside
  modified_base 12: mod_base = OTHER; note = 2'-O-methoxy nucleoside
  modified_base 13: mod_base = OTHER; note = 2'-O-methoxy nucleoside
  modified_base 14: mod_base = OTHER; note = 2'-fluoro nucleoside
  modified_base 15: mod_base = OTHER; note = 2'-O-methoxy nucleoside
  modified_base 16: mod_base = OTHER; note = 2'-fluoro nucleoside
  modified_base 17: mod_base = OTHER; note = 2'-O-methoxy nucleoside
  modified_base 18: mod_base = OTHER; note = 2'-O-methoxy nucleoside
  modified_base 19: mod_base = OTHER; note = 2'-O-methoxy nucleoside
  modified_base 20: mod_base = OTHER; note = 2'-O-methoxy nucleoside
  modified_base 21: mod_base = OTHER; note = 2'-O-methoxy nucleoside with phosphorothioate bond
  modified_base 22: mod_base = OTHER; note = 2'-O-methoxy nucleoside with phosphorothioate bond
  modified_base 23: mod_base = OTHER; note = 2'-O-methoxy nucleoside
ttaataaaaatgctacaaaaccc

SEQ ID NO: 446 - RNA, 23 nt, synthetic construct
  source 1..23: mol_type = other RNA
  modified_base 1: mod_base = OTHER; note = 5'-vinyl-(E)-phosphonate-2'-methoxy nucleoside with phosphorothioate bond
  modified_base 2: mod_base = OTHER; note = 2'-fluoro nucleoside with phosphorothioate bond
  modified_base 3: mod_base = OTHER; note = 2'-O-methoxy nucleoside
  modified_base 4: mod_base = OTHER; note = 2'-fluoro nucleoside
  modified_base 5: mod_base = OTHER; note = 2'-fluoro nucleoside
  modified_base 6: mod_base = OTHER; note = 2'-fluoro nucleoside
  modified_base 7: mod_base = OTHER; note = 2'-O-methoxy nucleoside
  modified_base 8: mod_base = OTHER; note = 2'-O-methoxy nucleoside
  modified_base 9: mod_base = OTHER; note = 2'-O-methoxy nucleoside
  modified_base 10: mod_base = OTHER; note = 2'-O-methoxy nucleoside
  modified_base 11: mod_base = OTHER; note = 2'-O-methoxy nucleoside
  modified_base 12: mod_base = OTHER; note = 2'-O-methoxy nucleoside
  modified_base 13: mod_base = OTHER; note = 2'-O-methoxy nucleoside
  modified_base 14: mod_base = OTHER; note = 2'-fluoro nucleoside
  modified_base 15: mod_base = OTHER; note = 2'-O-methoxy nucleoside
  modified_base 16: mod_base = OTHER; note = 2'-fluoro nucleoside
  modified_base 17: mod_base = OTHER; note = 2'-O-methoxy nucleoside
  modified_base 18: mod_base = OTHER; note = 2'-O-methoxy nucleoside
  modified_base 19: mod_base = OTHER; note = 2'-O-methoxy nucleoside
  modified_base 20: mod_base = OTHER; note = 2'-O-methoxy nucleoside
  modified_base 21: mod_base = OTHER; note = 2'-O-methoxy nucleoside with phosphorothioate bond
  modified_base 22: mod_base = OTHER; note = 2'-O-methoxy nucleoside with phosphorothioate bond
  modified_base 23: mod_base = OTHER; note = 2'-O-methoxy nucleoside
ttaataaaaatgctacaaaaccc

SEQ ID NO: 447 - RNA, 23 nt, synthetic construct
  source 1..23: mol_type = other RNA
  modified_base 1: mod_base = OTHER; note = 5'-vinyl-(E)-phosphonate-2'-methoxy nucleoside with phosphorothioate bond
  modified_base 2: mod_base = OTHER; note = 2'-fluoro nucleoside with phosphorothioate bond
  modified_base 3: mod_base = OTHER; note = 2'-O-methoxy nucleoside
  modified_base 4: mod_base = OTHER; note = 2'-fluoro nucleoside
  modified_base 5: mod_base = OTHER; note = 2'-fluoro nucleoside
  modified_base 6: mod_base = OTHER; note = 2'-fluoro nucleoside
  modified_base 7: mod_base = OTHER; note = 2,3-dihydroxypropyl nucleoside
  modified_base 8: mod_base = OTHER; note = 2'-O-methoxy nucleoside
  modified_base 9: mod_base = OTHER; note = 2'-O-methoxy nucleoside
  modified_base 10: mod_base = OTHER; note = 2'-O-methoxy nucleoside
  modified_base 11: mod_base = OTHER; note = 2'-O-methoxy nucleoside
  modified_base 12: mod_base = OTHER; note = 2'-O-methoxy nucleoside
  modified_base 13: mod_base = OTHER; note = 2'-O-methoxy nucleoside
  modified_base 14: mod_base = OTHER; note = 2'-fluoro nucleoside
  modified_base 15: mod_base = OTHER; note = 2'-O-methoxy nucleoside
  modified_base 16: mod_base = OTHER; note = 2'-fluoro nucleoside
  modified_base 17: mod_base = OTHER; note = 2'-O-methoxy nucleoside
  modified_base 18: mod_base = OTHER; note = 2'-O-methoxy nucleoside
  modified_base 19: mod_base = OTHER; note = 2'-O-methoxy nucleoside
  modified_base 20: mod_base = OTHER; note = 2'-O-methoxy nucleoside
  modified_base 21: mod_base = OTHER; note = 2'-O-methoxy nucleoside with phosphorothioate bond
  modified_base 22: mod_base = OTHER; note = 2'-O-methoxy nucleoside with phosphorothioate bond
  modified_base 23: mod_base = OTHER; note = 2'-O-methoxy nucleoside
ttaataaaaatgctacaaaaccc

SEQ ID NO: 448 - RNA, 23 nt, synthetic construct
  source 1..23: mol_type = other RNA
  modified_base 1: mod_base = OTHER; note = 5'-vinyl-(E)-phosphonate-2'-methoxy nucleoside with phosphorothioate bond
  modified_base 2: mod_base = OTHER; note = 2'-fluoro nucleoside with phosphorothioate bond
  modified_base 3: mod_base = OTHER; note = 2'-O-methoxy nucleoside
  modified_base 4: mod_base = OTHER; note = 2'-fluoro nucleoside
  modified_base 5: mod_base = OTHER; note = 2'-fluoro nucleoside
  modified_base 6: mod_base = OTHER; note = 2'-fluoro nucleoside
  modified_base 7: mod_base = OTHER; note = 2'-O-methoxy nucleoside
  modified_base 8: mod_base = OTHER; note = 2'-O-methoxy nucleoside
  modified_base 9: mod_base = OTHER; note = 2'-O-methoxy nucleoside
  modified_base 10: mod_base = OTHER; note = 2'-O-methoxy nucleoside
  modified_base 11: mod_base = OTHER; note = 2'-O-methoxy nucleoside
  modified_base 12: mod_base = OTHER; note = 2'-O-methoxy nucleoside
  modified_base 13: mod_base = OTHER; note = 2'-O-methoxy nucleoside
  modified_base 14: mod_base = OTHER; note = 2'-fluoro nucleoside
  modified_base 15: mod_base = OTHER; note = 2'-O-methoxy nucleoside
  modified_base 16: mod_base = OTHER; note = 2'-fluoro nucleoside
  modified_base 17: mod_base = OTHER; note = 2'-O-methoxy nucleoside
  modified_base 18: mod_base = OTHER; note = 2'-O-methoxy nucleoside
  modified_base 19: mod_base = OTHER; note = 2'-O-methoxy nucleoside
  modified_base 20: mod_base = OTHER; note = 2'-O-methoxy nucleoside
  modified_base 21: mod_base = OTHER; note = 2'-O-methoxy nucleoside with phosphorothioate bond
  modified_base 22: mod_base = OTHER; note = 2'-O-methoxy nucleoside with phosphorothioate bond
  modified_base 23: mod_base = OTHER; note = 2'-O-methoxy nucleoside
aaacccagaataaatatcttcaa

SEQ ID NO: 449 - RNA, 21 nt, synthetic construct
  source 1..21: mol_type = other RNA
  modified_base 1: mod_base = OTHER; note = 2'-O-methoxy nucleoside with phosphorothioate bond
  modified_base 2: mod_base = OTHER; note = 2'-O-methoxy nucleoside with phosphorothioate bond
  modified_base 3: mod_base = OTHER; note = 2'-O-methoxy nucleoside
  modified_base 4: mod_base = OTHER; note = 2'-O-methoxy nucleoside
  modified_base 5: mod_base = OTHER; note = 2'-O-methoxy nucleoside
  modified_base 6: mod_base = OTHER; note = 2'-O-methoxy nucleoside
  modified_base 7: mod_base = OTHER; note = 2'-fluoro nucleoside
  modified_base 8: mod_base = OTHER; note = 2'-O-methoxy nucleoside
  modified_base 9: mod_base = OTHER; note = 2'-fluoro nucleoside
  modified_base 10: mod_base = OTHER; note = 2'-fluoro nucleoside
  modified_base 11: mod_base = OTHER; note = 2'-fluoro nucleoside
  modified_base 12: mod_base = OTHER; note = 2'-O-methoxy nucleoside
  modified_base 13: mod_base = OTHER; note = 2'-O-methoxy nucleoside
  modified_base 14: mod_base = OTHER; note = 2'-O-methoxy nucleoside
  modified_base 15: mod_base = OTHER; note = 2'-O-methoxy nucleoside
  modified_base 16: mod_base = OTHER; note = 2'-O-methoxy nucleoside
  modified_base 17: mod_base = OTHER; note = 2'-fluoro nucleoside
  modified_base 18: mod_base = OTHER; note = 2'-O-methoxy nucleoside
  modified_base 19: mod_base = OTHER; note = 2'-O-methoxy nucleoside
  modified_base 20: mod_base = OTHER; note = 2'-O-methoxy nucleoside
  modified_base 21: mod_base = OTHER; note = 2'-O-methoxy nucleoside
aagatcctgcatgtcttccat

SEQ ID NO: 450 - RNA, 21 nt, synthetic construct
  source 1..21: mol_type = other RNA
  modified_base 1: mod_base = OTHER; note = 2'-O-methoxy nucleoside with phosphorothioate bond
  modified_base 2: mod_base = OTHER; note = 2'-O-methoxy nucleoside with phosphorothioate bond
  modified_base 3: mod_base = OTHER; note = 2'-O-methoxy nucleoside
  modified_base 4: mod_base = OTHER; note = 2'-O-methoxy nucleoside
  modified_base 5: mod_base = OTHER; note = 2'-O-methoxy nucleoside
  modified_base 6: mod_base = OTHER; note = 2'-O-methoxy nucleoside
  modified_base 7: mod_base = OTHER; note = 2'-fluoro nucleoside
  modified_base 8: mod_base = OTHER; note = 2'-O-methoxy nucleoside
  modified_base 9: mod_base = OTHER; note = 2'-fluoro nucleoside
  modified_base 10: mod_base = OTHER; note = 2'-fluoro nucleoside
  modified_base 11: mod_base = OTHER; note = 2'-fluoro nucleoside
  modified_base 12: mod_base = OTHER; note = 2'-O-methoxy nucleoside
  modified_base 13: mod_base = OTHER; note = 2'-O-methoxy nucleoside
  modified_base 14: mod_base = OTHER; note = 2'-O-methoxy nucleoside
  modified_base 15: mod_base = OTHER; note = 2'-O-methoxy nucleoside
  modified_base 16: mod_base = OTHER; note = 2'-O-methoxy nucleoside
  modified_base 17: mod_base = OTHER; note = 2'-fluoro nucleoside
  modified_base 18: mod_base = OTHER; note = 2'-O-methoxy nucleoside
  modified_base 19: mod_base = OTHER; note = 2'-O-methoxy nucleoside
  modified_base 20: mod_base = OTHER; note = 2'-O-methoxy nucleoside
  modified_base 21: mod_base = OTHER; note = 2'-O-methoxy nucleoside
aagatcctgcatgtcttccat

SEQ ID NO: 451 - RNA, 21 nt, synthetic construct
  source 1..21: mol_type = other RNA
  modified_base 1: mod_base = OTHER; note = 2'-O-methoxy nucleoside with phosphorothioate bond
  modified_base 2: mod_base = OTHER; note = 2'-O-methoxy nucleoside with phosphorothioate bond
  modified_base 3: mod_base = OTHER; note = 2'-O-methoxy nucleoside
  modified_base 4: mod_base = OTHER; note = 2'-O-methoxy nucleoside
  modified_base 5: mod_base = OTHER; note = 2'-O-methoxy nucleoside
  modified_base 6: mod_base = OTHER; note = 2'-O-methoxy nucleoside
  modified_base 7: mod_base = OTHER; note = 2'-fluoro nucleoside
  modified_base 8: mod_base = OTHER; note = 2'-O-methoxy nucleoside
  modified_base 9: mod_base = OTHER; note = 2'-fluoro nucleoside
  modified_base 10: mod_base = OTHER; note = 2'-fluoro nucleoside
  modified_base 11: mod_base = OTHER; note = 2'-fluoro nucleoside
  modified_base 12: mod_base = OTHER; note = 2'-O-methoxy nucleoside
  modified_base 13: mod_base = OTHER; note = 2'-O-methoxy nucleoside
  modified_base 14: mod_base = OTHER; note = 2'-O-methoxy nucleoside
  modified_base 15: mod_base = OTHER; note = 2'-O-methoxy nucleoside
  modified_base 16: mod_base = OTHER; note = 2'-O-methoxy nucleoside
  modified_base 17: mod_base = OTHER; note = 2'-fluoro nucleoside
  modified_base 18: mod_base = OTHER; note = 2'-O-methoxy nucleoside
  modified_base 19: mod_base = OTHER; note = 2'-O-methoxy nucleoside
  modified_base 20: mod_base = OTHER; note = 2'-O-methoxy nucleoside
  modified_base 21: mod_base = OTHER; note = 2'-O-methoxy nucleoside
aagatcctgcatgtcttccat

SEQ ID NO: 452 - RNA, 21 nt, synthetic construct
  source 1..21: mol_type = other RNA
  modified_base 1: mod_base = OTHER; note = 2'-O-methoxy nucleoside with phosphorothioate bond
  modified_base 2: mod_base = OTHER; note = 2'-O-methoxy nucleoside with phosphorothioate bond
  modified_base 3: mod_base = OTHER; note = 2'-O-methoxy nucleoside
  modified_base 4: mod_base = OTHER; note = 2'-O-methoxy nucleoside
  modified_base 5: mod_base = OTHER; note = 2'-O-methoxy nucleoside
  modified_base 6: mod_base = OTHER; note = 2'-O-methoxy nucleoside
  modified_base 7: mod_base = OTHER; note = 2'-fluoro nucleoside
  modified_base 8: mod_base = OTHER; note = 2'-O-methoxy nucleoside
  modified_base 9: mod_base = OTHER; note = 2'-fluoro nucleoside
  modified_base 10: mod_base = OTHER; note = 2'-fluoro nucleoside
  modified_base 11: mod_base = OTHER; note = 2'-fluoro nucleoside
  modified_base 12: mod_base = OTHER; note = 2'-O-methoxy nucleoside
  modified_base 13: mod_base = OTHER; note = 2'-O-methoxy nucleoside
  modified_base 14: mod_base = OTHER; note = 2'-O-methoxy nucleoside
  modified_base 15: mod_base = OTHER; note = 2'-O-methoxy nucleoside
  modified_base 16: mod_base = OTHER; note = 2'-O-methoxy nucleoside
  modified_base 17: mod_base = OTHER; note = 2'-fluoro nucleoside
  modified_base 18: mod_base = OTHER; note = 2'-O-methoxy nucleoside
  modified_base 19: mod_base = OTHER; note = 2'-O-methoxy nucleoside
  modified_base 20: mod_base = OTHER; note = 2'-O-methoxy nucleoside
  modified_base 21: mod_base = OTHER; note = 2'-O-methoxy nucleoside
tggaggcttagctttctggat

SEQ ID NO: 453 - RNA, 21 nt, synthetic construct
  source 1..21: mol_type = other RNA
  modified_base 1: mod_base = OTHER; note = 2'-O-methoxy nucleoside with phosphorothioate bond
  modified_base 2: mod_base = OTHER; note = 2'-O-methoxy nucleoside with phosphorothioate bond
  modified_base 3: mod_base = OTHER; note = 2'-O-methoxy nucleoside
  modified_base 4: mod_base = OTHER; note = 2'-O-methoxy nucleoside
  modified_base 5: mod_base = OTHER; note = 2'-O-methoxy nucleoside
  modified_base 6: mod_base = OTHER; note = 2'-O-methoxy nucleoside
  modified_base 7: mod_base = OTHER; note = 2'-fluoro nucleoside
  modified_base 8: mod_base = OTHER; note = 2'-O-methoxy nucleoside
  modified_base 9: mod_base = OTHER; note = 2'-fluoro nucleoside
  modified_base 10: mod_base = OTHER; note = 2'-fluoro nucleoside
  modified_base 11: mod_base = OTHER; note = 2'-fluoro nucleoside
  modified_base 12: mod_base = OTHER; note = 2'-O-methoxy nucleoside
  modified_base 13: mod_base = OTHER; note = 2'-O-methoxy nucleoside
  modified_base 14: mod_base = OTHER; note = 2'-O-methoxy nucleoside
  modified_base 15: mod_base = OTHER; note = 2'-O-methoxy nucleoside
  modified_base 16: mod_base = OTHER; note = 2'-O-methoxy nucleoside
  modified_base 17: mod_base = OTHER; note = 2'-fluoro nucleoside
  modified_base 18: mod_base = OTHER; note = 2'-O-methoxy nucleoside
  modified_base 19: mod_base = OTHER; note = 2'-O-methoxy nucleoside
  modified_base 20: mod_base = OTHER; note = 2'-O-methoxy nucleoside
  modified_base 21: mod_base = OTHER; note = 2'-O-methoxy nucleoside
tggaggcttagctttctggat

SEQ ID NO: 454 - RNA, 21 nt, synthetic construct
  source 1..21: mol_type = other RNA
  modified_base 1: mod_base = OTHER; note = 2'-O-methoxy nucleoside with phosphorothioate bond
  modified_base 2: mod_base = OTHER; note = 2'-O-methoxy nucleoside with phosphorothioate bond
  modified_base 3: mod_base = OTHER; note = 2'-O-methoxy nucleoside
  modified_base 4: mod_base = OTHER; note = 2'-O-methoxy nucleoside
  modified_base 5: mod_base = OTHER; note = 2'-O-methoxy nucleoside
  modified_base 6: mod_base = OTHER; note = 2'-O-methoxy nucleoside
  modified_base 7: mod_base = OTHER; note = 2'-fluoro nucleoside
  modified_base 8: mod_base = OTHER; note = 2'-O-methoxy nucleoside
  modified_base 9: mod_base = OTHER; note = 2'-fluoro nucleoside
  modified_base 10: mod_base = OTHER; note = 2'-fluoro nucleoside
  modified_base 11: mod_base = OTHER; note = 2'-fluoro nucleoside
  modified_base 12: mod_base = OTHER; note = 2'-O-methoxy nucleoside
  modified_base 13: mod_base = OTHER; note = 2'-O-methoxy nucleoside
  modified_base 14: mod_base = OTHER; note = 2'-O-methoxy nucleoside
  modified_base 15: mod_base = OTHER; note = 2'-O-methoxy nucleoside
  modified_base 16: mod_base = OTHER; note = 2'-O-methoxy nucleoside
  modified_base 17: mod_base = OTHER; note = 2'-fluoro nucleoside
  modified_base 18: mod_base = OTHER; note = 2'-O-methoxy nucleoside
  modified_base 19: mod_base = OTHER; note = 2'-O-methoxy nucleoside
  modified_base 20: mod_base = OTHER; note = 2'-O-methoxy nucleoside
  modified_base 21: mod_base = OTHER; note = 2'-O-methoxy nucleoside
tggaggcttagctttctggat

SEQ ID NO: 455 - RNA, 21 nt, synthetic construct
  source 1..21: mol_type = other RNA
  modified_base 1: mod_base = OTHER; note = 2'-O-methoxy nucleoside with phosphorothioate bond
  modified_base 2: mod_base = OTHER; note = 2'-O-methoxy nucleoside with phosphorothioate bond
  modified_base 3: mod_base = OTHER; note = 2'-O-methoxy nucleoside
  modified_base 4: mod_base = OTHER; note = 2'-O-methoxy nucleoside
  modified_base 5: mod_base = OTHER; note = 2'-O-methoxy nucleoside
  modified_base 6: mod_base = OTHER; note = 2'-O-methoxy nucleoside
  modified_base 7: mod_base = OTHER; note = 2'-fluoro nucleoside
  modified_base 8: mod_base = OTHER; note = 2'-O-methoxy nucleoside
  modified_base 9: mod_base = OTHER; note = 2'-fluoro nucleoside
  modified_base 10: mod_base = OTHER; note = 2'-fluoro nucleoside
  modified_base 11: mod_base = OTHER; note = 2'-fluoro nucleoside
  modified_base 12: mod_base = OTHER; note = 2'-O-methoxy nucleoside
  modified_base 13: mod_base = OTHER; note = 2'-O-methoxy nucleoside
  modified_base 14: mod_base = OTHER; note = 2'-O-methoxy nucleoside
  modified_base 15: mod_base = OTHER; note = 2'-O-methoxy nucleoside
  modified_base 16: mod_base = OTHER; note = 2'-O-methoxy nucleoside
  modified_base 17: mod_base = OTHER; note = 2'-fluoro nucleoside
  modified_base 18: mod_base = OTHER; note = 2'-O-methoxy nucleoside
  modified_base 19: mod_base = OTHER; note = 2'-O-methoxy nucleoside
  modified_base 20: mod_base = OTHER; note = 2'-O-methoxy nucleoside
  modified_base 21: mod_base = OTHER; note = 2'-O-methoxy nucleoside
tggaggcttagctttctggat

SEQ ID NO: 456 - RNA, 21 nt, synthetic construct
  source 1..21: mol_type = other RNA
  modified_base 1: mod_base = OTHER; note = 2'-O-methoxy nucleoside with phosphorothioate bond
  modified_base 2: mod_base = OTHER; note = 2'-O-methoxy nucleoside with phosphorothioate bond
  modified_base 3: mod_base = OTHER; note = 2'-O-methoxy nucleoside
  modified_base 4: mod_base = OTHER; note = 2'-O-methoxy nucleoside
  modified_base 5: mod_base = OTHER; note = 2'-O-methoxy nucleoside
  modified_base 6: mod_base = OTHER; note = 2'-O-methoxy nucleoside
  modified_base 7: mod_base = OTHER; note = 2'-fluoro nucleoside
  modified_base 8: mod_base = OTHER; note = 2'-O-methoxy nucleoside
  modified_base 9: mod_base = OTHER; note = 2'-fluoro nucleoside
  modified_base 10: mod_base = OTHER; note = 2'-fluoro nucleoside
  modified_base 11: mod_base = OTHER; note = 2'-fluoro nucleoside
  modified_base 12: mod_base = OTHER; note = 2'-O-methoxy nucleoside
  modified_base 13: mod_base = OTHER; note = 2'-O-methoxy nucleoside
  modified_base 14: mod_base = OTHER; note = 2'-O-methoxy nucleoside
  modified_base 15: mod_base = OTHER; note = 2'-O-methoxy nucleoside
  modified_base 16: mod_base = OTHER; note = 2'-O-methoxy nucleoside
  modified_base 17: mod_base = OTHER; note = 2'-fluoro nucleoside
  modified_base 18: mod_base = OTHER; note = 2'-O-methoxy nucleoside
  modified_base 19: mod_base = OTHER; note = 2'-O-methoxy nucleoside
  modified_base 20: mod_base = OTHER; note = 2'-O-methoxy nucleoside
  modified_base 21: mod_base = OTHER; note = 2'-O-methoxy nucleoside
cttttgtaacttgaagatatt

SEQ ID NO: 457 - RNA, 21 nt, synthetic construct
  source 1..21: mol_type = other RNA
  modified_base 1: mod_base = OTHER; note = 2'-O-methoxy nucleoside with phosphorothioate bond
  modified_base 2: mod_base = OTHER; note = 2'-O-methoxy nucleoside with phosphorothioate bond
  modified_base 3: mod_base = OTHER; note = 2'-O-methoxy nucleoside
  modified_base 4: mod_base = OTHER; note = 2'-O-methoxy nucleoside
  modified_base 5: mod_base = OTHER; note = 2'-O-methoxy nucleoside
  modified_base 6: mod_base = OTHER; note = 2'-O-methoxy nucleoside
  modified_base 7: mod_base = OTHER; note = 2'-fluoro nucleoside
  modified_base 8: mod_base = OTHER; note = 2'-O-methoxy nucleoside
  modified_base 9: mod_base = OTHER; note = 2'-fluoro nucleoside
  modified_base 10: mod_base = OTHER; note = 2'-fluoro nucleoside
  modified_base 11: mod_base = OTHER; note = 2'-fluoro nucleoside
  modified_base 12: mod_base = OTHER; note = 2'-O-methoxy nucleoside
  modified_base 13: mod_base = OTHER; note = 2'-O-methoxy nucleoside
  modified_base 14: mod_base = OTHER; note = 2'-O-methoxy nucleoside
  modified_base 15: mod_base = OTHER; note = 2'-O-methoxy nucleoside
  modified_base 16: mod_base = OTHER; note = 2'-O-methoxy nucleoside
  modified_base 17: mod_base = OTHER; note = 2'-fluoro nucleoside
  modified_base 18: mod_base = OTHER; note = 2'-O-methoxy nucleoside
  modified_base 19: mod_base = OTHER; note = 2'-O-methoxy nucleoside
  modified_base 20: mod_base = OTHER; note = 2'-O-methoxy nucleoside
  modified_base 21: mod_base = OTHER; note = 2'-O-methoxy nucleoside
cttttgtaacttgaagatatt

SEQ ID NO: 458 - RNA, 21 nt, synthetic construct
  source 1..21: mol_type = other RNA
  modified_base 1: mod_base = OTHER; note = 2'-O-methoxy nucleoside with phosphorothioate bond
  modified_base 2: mod_base = OTHER; note = 2'-O-methoxy nucleoside with phosphorothioate bond
  modified_base 3: mod_base = OTHER; note = 2'-O-methoxy nucleoside
  modified_base 4: mod_base = OTHER; note = 2'-O-methoxy nucleoside
  modified_base 5: mod_base = OTHER; note = 2'-O-methoxy nucleoside
  modified_base 6: mod_base = OTHER; note = 2'-O-methoxy nucleoside
  modified_base 7: mod_base = OTHER; note = 2'-fluoro nucleoside
  modified_base 8: mod_base = OTHER; note = 2'-O-methoxy nucleoside
  modified_base 9: mod_base = OTHER; note = 2'-fluoro nucleoside
  modified_base 10: mod_base = OTHER; note = 2'-fluoro nucleoside
  modified_base 11: mod_base = OTHER; note = 2'-fluoro nucleoside
  modified_base 12: mod_base = OTHER; note = 2'-O-methoxy nucleoside
  modified_base 13: mod_base = OTHER; note = 2'-O-methoxy nucleoside
  modified_base 14: mod_base = OTHER; note = 2'-O-methoxy nucleoside
  modified_base 15: mod_base = OTHER; note = 2'-O-methoxy nucleoside
  modified_base 16: mod_base = OTHER; note = 2'-O-methoxy nucleoside
  modified_base 17: mod_base = OTHER; note = 2'-fluoro nucleoside
  modified_base 18: mod_base = OTHER; note = 2'-O-methoxy nucleoside
  modified_base 19: mod_base = OTHER; note = 2'-O-methoxy nucleoside
  modified_base 20: mod_base = OTHER; note = 2'-O-methoxy nucleoside
  modified_base 21: mod_base = OTHER; note = 2'-O-methoxy nucleoside
cttttgtaacttgaagatatt

SEQ ID NO: 459 - RNA, 21 nt, synthetic construct
  source 1..21: mol_type = other RNA
  modified_base 1: mod_base = OTHER; note = 2'-O-methoxy nucleoside with phosphorothioate bond
  modified_base 2: mod_base = OTHER; note = 2'-O-methoxy nucleoside with phosphorothioate bond
  modified_base 3: mod_base = OTHER; note = 2'-O-methoxy nucleoside
  modified_base 4: mod_base = OTHER; note = 2'-O-methoxy nucleoside
  modified_base 5: mod_base = OTHER; note = 2'-O-methoxy nucleoside
  modified_base 6: mod_base = OTHER; note = 2'-O-methoxy nucleoside
  modified_base 7: mod_base = OTHER; note = 2'-fluoro nucleoside
  modified_base 8: mod_base = OTHER; note = 2'-O-methoxy nucleoside
  modified_base 9: mod_base = OTHER; note = 2'-fluoro nucleoside
  modified_base 10: mod_base = OTHER; note = 2'-O-methoxy nucleoside
  modified_base 11: mod_base = OTHER; note = 2'-fluoro nucleoside
  modified_base 12: mod_base = OTHER; note = 2'-O-methoxy nucleoside
  modified_base 13: mod_base = OTHER; note = 2'-O-methoxy nucleoside
  modified_base 14: mod_base = OTHER; note = 2'-O-methoxy nucleoside
  modified_base 15: mod_base = OTHER; note = 2'-O-methoxy nucleoside
  modified_base 16: mod_base = OTHER; note = 2'-O-methoxy nucleoside
  modified_base 17: mod_base = OTHER; note = 2'-fluoro nucleoside
  modified_base 18: mod_base = OTHER; note = 2'-O-methoxy nucleoside
  modified_base 19: mod_base = OTHER; note = 2'-O-methoxy nucleoside
  modified_base 20: mod_base = OTHER; note = 2'-O-methoxy nucleoside
  modified_base 21: mod_base = OTHER; note = 2'-O-methoxy nucleoside
cttttgtaacttgaagatatt

SEQ ID NO: 460 - RNA, 21 nt, synthetic construct
  source 1..21: mol_type = other RNA
  modified_base 1: mod_base = OTHER; note = 2'-O-methoxy nucleoside with phosphorothioate bond
  modified_base 2: mod_base = OTHER; note = 2'-O-methoxy nucleoside with phosphorothioate bond
  modified_base 3: mod_base = OTHER; note = 2'-O-methoxy nucleoside
  modified_base 4: mod_base = OTHER; note = 2'-O-methoxy nucleoside
  modified_base 5: mod_base = OTHER; note = 2'-O-methoxy nucleoside
  modified_base 6: mod_base = OTHER; note = 2'-O-methoxy nucleoside
  modified_base 7: mod_base = OTHER; note = 2'-fluoro nucleoside
  modified_base 8: mod_base = OTHER; note = 2'-O-methoxy nucleoside
  modified_base 9: mod_base = OTHER; note = 2'-fluoro nucleoside
  modified_base 10: mod_base = OTHER; note = 2'-fluoro nucleoside
  modified_base 11: mod_base = OTHER; note = 2'-fluoro nucleoside
  modified_base 12: mod_base = OTHER; note = 2'-O-methoxy nucleoside
  modified_base 13: mod_base = OTHER; note = 2'-O-methoxy nucleoside
  modified_base 14: mod_base = OTHER; note = 2'-O-methoxy nucleoside
  modified_base 15: mod_base = OTHER; note = 2'-O-methoxy nucleoside
  modified_base 16: mod_base = OTHER; note = 2'-O-methoxy nucleoside
  modified_base 17: mod_base = OTHER; note = 2'-fluoro nucleoside
  modified_base 18: mod_base = OTHER; note = 2'-O-methoxy nucleoside
  modified_base 19: mod_base = OTHER; note = 2'-O-methoxy nucleoside
  modified_base 20: mod_base = OTHER; note = 2'-O-methoxy nucleoside
  modified_base 21: mod_base = OTHER; note = 2'-O-methoxy nucleoside
gaagatatttattctgggttt

SEQ ID NO: 461 - RNA, 21 nt, synthetic construct
  source 1..21: mol_type = other RNA
  modified_base 1: mod_base = OTHER; note = 2'-O-methoxy nucleoside with phosphorothioate bond
  modified_base 2: mod_base = OTHER; note = 2'-O-methoxy nucleoside with phosphorothioate bond
  modified_base 3: mod_base = OTHER; note = 2'-O-methoxy nucleoside
  modified_base 4: mod_base = OTHER; note = 2'-O-methoxy nucleoside
  modified_base 5: mod_base = OTHER; note = 2'-O-methoxy nucleoside
  modified_base 6: mod_base = OTHER; note = 2'-O-methoxy nucleoside
  modified_base 7: mod_base = OTHER; note = 2'-fluoro nucleoside
  modified_base 8: mod_base = OTHER; note = 2'-O-methoxy nucleoside
  modified_base 9: mod_base = OTHER; note = 2'-fluoro nucleoside
  modified_base 10: mod_base = OTHER; note = 2'-fluoro nucleoside
  modified_base 11: mod_base = OTHER; note = 2'-fluoro nucleoside
  modified_base 12: mod_base = OTHER; note = 2'-O-methoxy nucleoside
  modified_base 13: mod_base = OTHER; note = 2'-O-methoxy nucleoside
  modified_base 14: mod_base = OTHER; note = 2'-O-methoxy nucleoside
  modified_base 15: mod_base = OTHER; note = 2'-O-methoxy nucleoside
  modified_base 16: mod_base = OTHER; note = 2'-O-methoxy nucleoside
  modified_base 17: mod_base = OTHER; note = 2'-fluoro nucleoside
  modified_base 18: mod_base = OTHER; note = 2'-O-methoxy nucleoside
  modified_base 19: mod_base = OTHER; note = 2'-O-methoxy nucleoside
  modified_base 20: mod_base = OTHER; note = 2'-O-methoxy nucleoside
  modified_base 21: mod_base = OTHER; note = 2'-O-methoxy nucleoside
gaagatatttattctgggttt

SEQ ID NO: 462 - RNA, 21 nt, synthetic construct
  source 1..21: mol_type = other RNA
  modified_base 1: mod_base = OTHER; note = 2'-O-methoxy nucleoside with phosphorothioate bond
  modified_base 2: mod_base = OTHER; note = 2'-O-methoxy nucleoside with phosphorothioate bond
  modified_base 3: mod_base = OTHER; note = 2'-O-methoxy nucleoside
  modified_base 4: mod_base = OTHER; note = 2'-O-methoxy nucleoside
  modified_base 5: mod_base = OTHER; note = 2'-O-methoxy nucleoside
  modified_base 6: mod_base = OTHER; note = 2'-O-methoxy nucleoside
  modified_base 7: mod_base = OTHER; note = 2'-fluoro nucleoside
  modified_base 8: mod_base = OTHER; note = 2'-O-methoxy nucleoside
  modified_base 9: mod_base = OTHER; note = 2'-fluoro nucleoside
  modified_base 10: mod_base = OTHER; note = 2'-O-methoxy nucleoside
  modified_base 11: mod_base = OTHER; note = 2'-fluoro nucleoside
  modified_base 12: mod_base = OTHER; note = 2'-O-methoxy nucleoside
  modified_base 13: mod_base = OTHER; note = 2'-O-methoxy nucleoside
  modified_base 14: mod_base = OTHER; note = 2'-O-methoxy nucleoside
  modified_base 15: mod_base = OTHER; note = 2'-O-methoxy nucleoside
  modified_base 16: mod_base = OTHER; note = 2'-O-methoxy nucleoside
  modified_base 17: mod_base = OTHER; note = 2'-fluoro nucleoside
  modified_base 18: mod_base = OTHER; note = 2'-O-methoxy nucleoside
  modified_base 19: mod_base = OTHER; note = 2'-O-methoxy nucleoside
  modified_base 20: mod_base = OTHER; note = 2'-O-methoxy nucleoside
  modified_base 21: mod_base = OTHER; note = 2'-O-methoxy nucleoside
gaagatatttattctgggttt

SEQ ID NO: 463 - RNA, 21 nt, synthetic construct
  source 1..21: mol_type = other RNA
  modified_base 1: mod_base = OTHER; note = 2'-O-methoxy nucleoside with phosphorothioate bond
  modified_base 2: mod_base = OTHER; note = 2'-O-methoxy nucleoside with phosphorothioate bond
  modified_base 3: mod_base = OTHER; note = 2'-O-methoxy nucleoside
  modified_base 4: mod_base = OTHER; note = 2'-O-methoxy nucleoside
  modified_base 5: mod_base = OTHER; note = 2'-O-methoxy nucleoside
  modified_base 6: mod_base = OTHER; note = 2'-O-methoxy nucleoside
  modified_base 7: mod_base = OTHER; note = 2'-fluoro nucleoside
  modified_base 8: mod_base = OTHER; note = 2'-O-methoxy nucleoside
  modified_base 9: mod_base = OTHER; note = 2'-fluoro nucleoside
  modified_base 10: mod_base = OTHER; note = 2'-O-methoxy nucleoside
  modified_base 11: mod_base = OTHER; note = 2'-fluoro nucleoside
  modified_base 12: mod_base = OTHER; note = 2'-O-methoxy nucleoside
  modified_base 13: mod_base = OTHER; note = 2'-O-methoxy nucleoside
  modified_base 14: mod_base = OTHER; note = 2'-O-methoxy nucleoside
  modified_base 15: mod_base = OTHER; note = 2'-O-methoxy nucleoside
  modified_base 16: mod_base = OTHER; note = 2'-O-methoxy nucleoside
  modified_base 17: mod_base = OTHER; note = 2'-fluoro nucleoside
  modified_base 18: mod_base = OTHER; note = 2'-O-methoxy nucleoside
  modified_base 19: mod_base = OTHER; note = 2'-O-methoxy nucleoside
  modified_base 20: mod_base = OTHER; note = 2'-O-methoxy nucleoside
  modified_base 21: mod_base = OTHER; note = 2'-O-methoxy nucleoside
gaagatatttattctgggttt

SEQ ID NO: 464 - RNA, 21 nt, synthetic construct
  source 1..21: mol_type = other RNA
  modified_base 1: mod_base = OTHER; note = 2'-O-methoxy nucleoside with phosphorothioate bond
  modified_base 2: mod_base = OTHER; note = 2'-O-methoxy nucleoside with phosphorothioate bond
  modified_base 3: mod_base = OTHER; note = 2'-O-methoxy nucleoside
  modified_base 4: mod_base = OTHER; note = 2'-O-methoxy nucleoside
  modified_base 5: mod_base = OTHER; note = 2'-O-methoxy nucleoside
  modified_base 6: mod_base = OTHER; note = 2'-O-methoxy nucleoside
  modified_base 7: mod_base = OTHER; note = 2'-fluoro nucleoside
  modified_base 8: mod_base = OTHER; note = 2'-O-methoxy nucleoside
  modified_base 9: mod_base = OTHER; note = 2'-fluoro nucleoside
  modified_base 10: mod_base = OTHER; note = 2'-O-methoxy nucleoside
  modified_base 11: mod_base = OTHER; note = 2'-fluoro nucleoside
  modified_base 12: mod_base = OTHER; note = 2'-O-methoxy nucleoside
  modified_base 13: mod_base = OTHER; note = 2'-O-methoxy nucleoside
  modified_base 14: mod_base = OTHER; note = 2'-O-methoxy nucleoside
  modified_base 15: mod_base = OTHER; note = 2'-O-methoxy nucleoside
  modified_base 16: mod_base = OTHER; note = 2'-O-methoxy nucleoside
  modified_base 17: mod_base = OTHER; note = 2'-fluoro nucleoside
  modified_base 18: mod_base = OTHER; note = 2'-O-methoxy nucleoside
  modified_base 19: mod_base = OTHER; note = 2'-O-methoxy nucleoside
  modified_base 20: mod_base = OTHER; note = 2'-O-methoxy nucleoside
  modified_base 21: mod_base = OTHER; note = 2'-O-methoxy nucleoside
gaagatatttattctgggttt

SEQ ID NO: 465 - RNA, 21 nt, synthetic construct
  source 1..21: mol_type = other RNA
  modified_base 1: mod_base = OTHER; note = 2'-O-methoxy nucleoside with phosphorothioate bond
  modified_base 2: mod_base = OTHER; note = 2'-O-methoxy nucleoside with phosphorothioate bond
  modified_base 3: mod_base = OTHER; note = 2'-O-methoxy nucleoside
  modified_base 4: mod_base = OTHER; note = 2'-O-methoxy nucleoside
  modified_base 5: mod_base = OTHER; note = 2'-O-methoxy nucleoside
  modified_base 6: mod_base = OTHER; note = 2'-O-methoxy nucleoside
  modified_base 7: mod_base = OTHER; note = 2'-fluoro nucleoside
  modified_base 8: mod_base = OTHER; note = 2'-O-methoxy nucleoside
  modified_base 9: mod_base = OTHER; note = 2'-fluoro nucleoside
  modified_base 10: mod_base = OTHER; note = 2'-O-methoxy nucleoside
  modified_base 11: mod_base = OTHER; note = 2'-fluoro nucleoside
  modified_base 12: mod_base = OTHER; note = 2'-O-methoxy nucleoside
  modified_base 13: mod_base = OTHER; note = 2'-O-methoxy nucleoside
  modified_base 14: mod_base = OTHER; note = 2'-O-methoxy nucleoside
  modified_base 15: mod_base = OTHER; note = 2'-O-methoxy nucleoside
  modified_base 16: mod_base = OTHER; note = 2'-O-methoxy nucleoside
  modified_base 17: mod_base = OTHER; note = 2'-fluoro nucleoside
  modified_base 18: mod_base = OTHER; note = 2'-O-methoxy nucleoside
  modified_base 19: mod_base = OTHER; note = 2'-O-methoxy nucleoside
  modified_base 20: mod_base = OTHER; note = 2'-O-methoxy nucleoside
  modified_base 21: mod_base = OTHER; note = 2'-O-methoxy nucleoside
gaagatatttattctgggttt

SEQ ID NO: 466 - RNA, 21 nt, synthetic construct
  source 1..21: mol_type = other RNA
  modified_base 1: mod_base = OTHER; note = 2'-O-methoxy nucleoside with phosphorothioate bond
  modified_base 2: mod_base = OTHER; note = 2'-O-methoxy nucleoside with phosphorothioate bond
  modified_base 3: mod_base = OTHER; note = 2'-O-methoxy nucleoside
  modified_base 4: mod_base = OTHER; note = 2'-O-methoxy nucleoside
  modified_base 5: mod_base = OTHER; note = 2'-O-methoxy nucleoside
  modified_base 6: mod_base = OTHER; note = 2'-O-methoxy nucleoside
  modified_base 7: mod_base = OTHER; note = 2'-fluoro nucleoside
  modified_base 8: mod_base = OTHER; note = 2'-O-methoxy nucleoside
  modified_base 9: mod_base = OTHER; note = 2'-fluoro nucleoside
  modified_base 10: mod_base = OTHER; note = 2'-fluoro nucleoside
  modified_base 11: mod_base = OTHER; note = 2'-fluoro nucleoside
  modified_base 12: mod_base = OTHER; note = 2'-O-methoxy nucleoside
  modified_base 13: mod_base = OTHER; note = 2'-O-methoxy nucleoside
  modified_base 14: mod_base = OTHER; note = 2'-O-methoxy nucleoside
  modified_base 15: mod_base = OTHER; note = 2'-O-methoxy nucleoside
  modified_base 16: mod_base = OTHER; note = 2'-O-methoxy nucleoside
  modified_base 17: mod_base = OTHER; note = 2'-fluoro nucleoside
  modified_base 18: mod_base = OTHER; note = 2'-O-methoxy nucleoside
  modified_base 19: mod_base = OTHER; note = 2'-O-methoxy nucleoside
  modified_base 20: mod_base = OTHER; note = 2'-O-methoxy nucleoside
  modified_base 21: mod_base = OTHER; note = 2'-O-methoxy nucleoside
gttttgtagcatttttattaa

SEQ ID NO: 467 - RNA, 21 nt, synthetic construct
  source 1..21: mol_type = other RNA
  modified_base 1: mod_base = OTHER; note = 2'-O-methoxy nucleoside with phosphorothioate bond
  modified_base 2: mod_base = OTHER; note = 2'-O-methoxy nucleoside with phosphorothioate bond
  modified_base 3: mod_base = OTHER; note = 2'-O-methoxy nucleoside
  modified_base 4: mod_base = OTHER; note = 2'-O-methoxy nucleoside
  modified_base 5: mod_base = OTHER; note = 2'-O-methoxy nucleoside
  modified_base 6: mod_base = OTHER; note = 2'-O-methoxy nucleoside
  modified_base 7: mod_base = OTHER; note = 2'-fluoro nucleoside
  modified_base 8: mod_base = OTHER; note = 2'-O-methoxy nucleoside
  modified_base 9: mod_base = OTHER; note = 2'-fluoro nucleoside
  modified_base 10: mod_base = OTHER; note = 2'-fluoro nucleoside
  modified_base 11: mod_base = OTHER; note = 2'-fluoro nucleoside
  modified_base 12: mod_base = OTHER; note = 2'-O-methoxy nucleoside
  modified_base 13: mod_base = OTHER; note = 2'-O-methoxy nucleoside
  modified_base 14: mod_base = OTHER; note = 2'-O-methoxy nucleoside
  modified_base 15: mod_base = OTHER; note = 2'-O-methoxy nucleoside
  modified_base 16: mod_base = OTHER; note = 2'-O-methoxy nucleoside
  modified_base 17: mod_base = OTHER; note = 2'-fluoro nucleoside
  modified_base 18: mod_base = OTHER; note = 2'-O-methoxy nucleoside
  modified_base 19: mod_base = OTHER; note = 2'-O-methoxy nucleoside
  modified_base 20: mod_base = OTHER; note = 2'-O-methoxy nucleoside
  modified_base 21: mod_base = OTHER; note = 2'-O-methoxy nucleoside
gttttgtagcatttttattaa

SEQ ID NO: 468 - RNA, 21 nt, synthetic construct
  source 1..21: mol_type = other RNA
  modified_base 1: mod_base = OTHER; note = 2'-O-methoxy nucleoside with phosphorothioate bond
  modified_base 2: mod_base = OTHER; note = 2'-O-methoxy nucleoside with phosphorothioate bond
  modified_base 3: mod_base = OTHER; note = 2'-O-methoxy nucleoside
  modified_base 4: mod_base = OTHER; note = 2'-O-methoxy nucleoside
  modified_base 5: mod_base = OTHER; note = 2'-O-methoxy nucleoside
  modified_base 6: mod_base = OTHER; note = 2'-O-methoxy nucleoside
  modified_base 7: mod_base = OTHER; note = 2'-fluoro nucleoside
  modified_base 8: mod_base = OTHER; note = 2'-O-methoxy nucleoside
  modified_base 9: mod_base = OTHER; note = 2'-fluoro nucleoside
  modified_base 10: mod_base = OTHER; note = 2'-fluoro nucleoside
  modified_base 11: mod_base = OTHER; note = 2'-fluoro nucleoside
  modified_base 12: mod_base = OTHER; note = 2'-O-methoxy nucleoside
  modified_base 13: mod_base = OTHER; note = 2'-O-methoxy nucleoside
  modified_base 14: mod_base = OTHER; note = 2'-O-methoxy nucleoside
  modified_base 15: mod_base = OTHER; note = 2'-O-methoxy nucleoside
  modified_base 16: mod_base = OTHER; note = 2'-O-methoxy nucleoside
  modified_base 17: mod_base = OTHER; note = 2'-fluoro nucleoside
  modified_base 18: mod_base = OTHER; note = 2'-O-methoxy nucleoside
  modified_base 19: mod_base = OTHER; note = 2'-O-methoxy nucleoside
  modified_base 20: mod_base = OTHER; note = 2'-O-methoxy nucleoside
  modified_base 21: mod_base = OTHER; note = 2'-O-methoxy nucleoside
gttttgtagcatttttattaa

SEQ ID NO: 469 - RNA, 21 nt, synthetic construct
  source 1..21: mol_type = other RNA
  modified_base 1: mod_base = OTHER; note = 2'-O-methoxy nucleoside with phosphorothioate bond
  modified_base 2: mod_base = OTHER; note = 2'-O-methoxy nucleoside with phosphorothioate bond
  modified_base 3: mod_base = OTHER; note = 2'-O-methoxy nucleoside
  modified_base 4: mod_base = OTHER; note = 2'-O-methoxy nucleoside
  modified_base 5: mod_base = OTHER; note = 2'-O-methoxy nucleoside
  modified_base 6: mod_base = OTHER; note = 2'-O-methoxy nucleoside
  modified_base 7: mod_base = OTHER; note = 2'-fluoro nucleoside
  modified_base 8: mod_base = OTHER; note = 2'-O-methoxy nucleoside
  modified_base 9: mod_base = OTHER; note = 2'-fluoro nucleoside
  modified_base 10: mod_base = OTHER; note = 2'-fluoro nucleoside
  modified_base 11: mod_base = OTHER; note = 2'-fluoro nucleoside
  modified_base 12: mod_base = OTHER; note = 2'-O-methoxy nucleoside
  modified_base 13: mod_base = OTHER; note = 2'-O-methoxy nucleoside
  modified_base 14: mod_base = OTHER; note = 2'-O-methoxy nucleoside
  modified_base 15: mod_base = OTHER; note = 2'-O-methoxy nucleoside
  modified_base 16: mod_base = OTHER; note = 2'-O-methoxy nucleoside
  modified_base 17: mod_base = OTHER; note = 2'-fluoro nucleoside
  modified_base 18: mod_base = OTHER; note = 2'-O-methoxy nucleoside
  modified_base 19: mod_base = OTHER; note = 2'-O-methoxy nucleoside
  modified_base 20: mod_base = OTHER; note = 2'-O-methoxy nucleoside
  modified_base 21: mod_base = OTHER; note = 2'-O-methoxy nucleoside
gttttgtagcatttttattaa
